(19) United States
(12) Patent Application Publication
(10) Pub. No.: US 2005/0142543 A1
(43) Pub. Date: Jun. 30, 2005

(54) Method of designing addressable array for detection of nucleic acid sequence differences using ligase detection reaction

(76) Inventors: Francis Barany, New York, NY (US); Monib Zirvi, Willingboro, NJ (US); Norman P. Gerry, Boston, MA (US); Reyna Favis, Iselin, NJ (US); Richard Kliman, Iselin, NJ (US)

Correspondence Address: Michael L Goldman;Nixon Peabody, Clinton Square, P O Box 31051, Rochester, NY, 14603-1051, US

(21) Appl. No.: 10/257,158

(22) PCT Filed: Apr. 4, 2001
(86) PCT No.: PCT/US01/10958

Related U.S. Application Data
(60) Provisional application No. 60/197,271, filed on Apr. 14, 2000.

(51) Int. Cl. C12Q 1/68; C12P 19/34

(52) U.S. Cl. 435/6; 435/91.2

(57) ABSTRACT

The present invention is directed to a method of designing a plurality of capture oligonucleotide probes for use on a support to which complementary oligonucleotide probes will hybridize with little mismatch, where the plural capture oligonucleotide probes have melting temperatures within a narrow range. The first step of the method involves providing a first set of a plurality of tetramers of four nucleotides linked together, where (1) each tetramer within the set differs from all other tetramers in the set by at least two nucleotide bases, (2) no two tetramers within a set are complementary to one another, (3) no tetramers within a set are palindromic or dinucleotide repeats, and (4) no tetramer within a set has one or less or three or more G or C nucleotides. Groups of 2 to 4 of the tetramers from the first set are linked together to form a collection of multimer units. From the collection of multimer units, all multimer units formed from the same tetramer and all multimer units having a melting temperature in ° C. of less than 4 times the number of tetramers forming a multimer unit are removed to form a modified collection of multimer units. The modified collection of multimer units is arranged in a list in order of melting temperature. The order of the modified collection of multimer units is randomized in 2° C. increments of melting temperature.

[0001] This invention was developed with government funding under National Institutes of Health Grant Nos. GM-41337-06, GM43552-05, GM-42722-07, and GM-51628-02. The U.S. Government may have certain rights.

### FIELD OF THE INVENTION

[0002] The present invention is directed to a method of designing a plurality of capture oligonucleotide probes for use on a support to which complementary oligonucleotide probes will hybridize with little mismatch, where the plural capture oligonucleotide probes have melting temperatures within a narrow range. Other aspects of the present invention relate to a support with the plurality of oligonucleotide probes immobilized on the support, a method of using the support to detect single-base changes, insertions, deletions, or translocations in a plurality of target nucleotide sequences, and a kit for such detection, which includes the support on which the oligonucleotides have been immobilized.

### BACKGROUND OF THE INVENTION

Detection of Sequence Differences

[0003] Large-scale multiplex analysis of highly polymorphic loci is needed for practical identification of individuals, e.g., for paternity testing and in forensic science (Reynolds et al., Anal. Chem., 63: 2-15 (1991)), for organ-transplant donor-recipient matching (Buyse et al., Tissue Antigens, 41: 1-14 (1993) and Gyllensten et al., PCR Meth. Appl, 1: 91-98 (1991)), for genetic disease diagnosis, prognosis, and pre-natal counseling (Chamberlain et al., Nucleic Acids Res., 16: 11141-11156 (1988) and L. C. Tsui, Human Mutat., 1: 197-203 (1992)), and the study of oncogenic mutations (Hollstein et al., Science, 253: 49-53 (1991)). In addition, the cost-effectiveness of infectious disease diagnosis by nucleic acid analysis varies directly with the multiplex scale in panel testing. Many of these applications depend on the discrimination of single-base differences at a multiplicity of sometimes closely space loci.

[0004] A variety of DNA hybridization techniques are available for detecting the presence of one or more selected polynucleotide sequences in a sample containing a large number of sequence regions. In a simple method, which relies on fragment capture and labeling, a fragment containing a selected sequence is captured by hybridization to an immobilized probe. The captured fragment can be labeled by hybridization to a second probe which contains a detectable reporter moiety.

[0005] Another widely used method is Southern blotting. In this method, a mixture of DNA fragments in a sample are fractionated by gel electrophoresis, then fixed on a nitrocellulose filter. By reacting the filter with one or more labeled probes under hybridization conditions, the presence of bands containing the probe sequence can be identified. The method is especially useful for identifying fragments in a restriction-enzyme DNA digest which contain a given probe sequence, and for analyzing restriction-fragment length polymorphisms (“RFLPs”).

[0006] Another approach to detecting the presence of a given sequence or sequences in a polynucleotide sample involves selective amplification of the sequence(s) by polymerase chain reaction. U.S. Pat. No. 4,683,202 to Mullis, et al. and R. K. Saiki, et al., Science 230: 1350 (1985). In this method, primers complementary to opposite end portions of the selected sequence(s) are used to promote, in conjunction with thermal cycling, successive rounds of primer-initiated replication. The amplified sequence may be readily identified by a variety of techniques. This approach is particularly useful for detecting the presence of low-copy sequences in a polynucleotide-containing sample, e.g., for detecting pathogen sequences in a body-fluid sample.

[0007] More recently, methods of identifying known target sequences by probe ligation methods have been reported. U.S. Pat. No. 4,883,750 to N. M. Whiteley, et al., D. Y. Wu, et al., Genomics 4: 560 (1989), U. Landegren, et al., Science 241: 1077 (1988), and E. Winn-Deen, et al., Clin. Chem. 37: 1522 (1991). In one approach, known as oligonucleotide ligation assay (“OLA”), two probes or probe elements which span a target region of interest are hybridized with the target region. Where the probe elements match (basepair with) adjacent target bases at the confronting ends of the probe elements, the two elements can be joined by ligation, e.g., by treatment with ligase. The ligated probe element is then assayed, evidencing the presence of the target sequence.

[0008] In a modification of this approach, the ligated probe elements act as a template for a pair of complementary probe elements. With continued cycles of denaturation, hybridization, and ligation in the presence of the two complementary pairs of probe elements, the target sequence is amplified exponentially, i.e., exponentially allowing very small amounts of target sequence to be detected and/or amplified. This approach is referred to as ligase chain reaction (“LCR”). F. Barany, “Genetic Disease Detection and DNA Amplification Using Cloned Thermostable Ligase,” Proc. Nat'l Acad. Sci. USA, 88: 189-93 (1991) and F. Barany, “The Ligase Chain Reaction (LCR) in a PCR World,” PCR Methods and Applications, 1: 5-16 (1991).

[0009] Another scheme for multiplex detection of nucleic acid sequence differences is disclosed in U.S. Pat. No. 5,470,705 to Grossman et. al. where sequence-specific probes, having a detectable label and a distinctive ratio of charge/translational frictional drag, can be hybridized to a target and ligated together. This technique was used in Grossman, et. al., “High-density Multiplex Detection of Nucleic Acid Sequences: Oligonucleotide Ligation Assay and Sequence-coded Separation,” Nucl. Acids Res. 22(21): 4527-34 (1994) for the large scale multiplex analysis of the cystic fibrosis transmembrane regulator gene.

[0010] Jou, et. al., “Deletion Detection in Dystrophin Gene by Multiplex Gap Ligase Chain Reaction and Immunochromatographic Strip Technology,” Human Mutation 5: 86-93 (1995) relates to the use of a so called “gap ligase chain reaction” process to amplify simultaneously selected regions of multiple exons with the amplified products being read on an immunochromatographic strip having antibodies specific to the different haptens on the probes for each exon.

[0011] There is a growing need, e.g., in the field of genetic screening, for methods useful in detecting the presence or absence of each of a large number of sequences in a target polynucleotide. For example, as many as 400 different mutations have been associated with cystic fibrosis. In screening for genetic predisposition to this disease, it is optimal to test all of the possible different gene sequence mutations in the subject's genomic DNA, in order to make a positive identification of “cystic fibrosis”. It would be ideal to test for the presence or absence of all of the possible mutation sites in a single assay. However, the prior-art methods described above are not readily adaptable for use in detecting multiple selected sequences in a convenient, automated single-assay format.

[0012] Solid-phase hybridization assays require multiple liquid-handling steps, and some incubation and wash temperatures must be carefully controlled to keep the stringency needed for single-nucleotide mismatch discrimination. Multiplexing of this approach has proven difficult as optimal hybridization conditions vary greatly among probe sequences.

[0013] Allele-specific PCR products generally have the same size, and a given amplification tube is scored by the presence or absence of the product band in the gel lane associated with each reaction tube. Gibbs et al., Nucleic Acids Res., 17: 2437-2448 (1989). This approach requires splitting the test sample among multiple reaction tubes with different primer combinations, multiplying assay cost. PCR has also discriminated alleles by attaching different fluorescent dyes to competing allelic primers in a single reaction tube (F. F. Chehab, et al., Proc. Natl. Acad. Sci. USA, 86: 9178-9182 (1989)), but this route to multiplex analysis is limited in scale by the relatively few dyes which can be spectrally resolved in an economical manner with existing instrumentation and dye chemistry. The incorporation of bases modified with bulky side chains can be used to differentiate allelic PCR products by their electrophoretic mobility, but this method is limited by the successful incorporation of these modified bases by polymerase, and by the ability of electrophoresis to resolve relatively large PCR products which differ in size by only one of these groups. Livak et al., Nucleic Acids Res., 20: 4831-4837 (1989). Each PCR product is used to look for only a single mutation, making multiplexing difficult.

[0014] Ligation of allele-specific probes generally has used solid-phase capture (U. Landegren et al., Science, 241: 1077-1080 (1988); Nickerson et al., Proc. Natl. Acad. Sci. USA, 87: 8923-8927 (1990)) or size-dependent separation (D. Y. Wu, et al., Genomics, 4: 560-569 (1989) and F. Barany, Proc. Natl. Acad. Sci., 88: 189-193 (1991)) to resolve the allelic signals, the latter method being limited in multiplex scale by the narrow size range of ligation probes. The gap ligase chain reaction process requires an additional step—polymerase extension. The use of probes with distinctive ratios of charge/translational frictional drag technique to a more complex multiplex will either require longer electrophoresis times or the use of an alternate form of detection.

[0015] The need thus remains for a rapid single assay format to detect the presence or absence of multiple selected sequences in a polynucleotide sample.

Use of Oligonucleotide Arrays for Nucleic Acid Analysis

[0016] Ordered arrays of oligonucleotides immobilized on a solid support have been proposed for sequencing, sorting, isolating, and manipulating DNA. It has been recognized that hybridization of a cloned single-stranded DNA molecule to all possible oligonucleotide probes of a given length can theoretically identify the corresponding complementary DNA segments present in the molecule. In such an array, each oligonucleotide probe is immobilized on a solid support at a different predetermined position. All the oligonucleotide segments in a DNA molecule can be surveyed with such an array.

[0017] One example of a procedure for sequencing DNA molecules using arrays of oligonucleotides is disclosed in U.S. Pat. No. 5,202,231 to Drmanac, et. al. This involves application of target DNA to a solid support to which a plurality of oligonucleotides are attached. Sequences are read by hybridization of segments of the target DNA to the oligonucleotides and assembly of overlapping segments of hybridized oligonucleotides. The array utilizes all possible oligonucleotides of a certain length between 11 and 20 nucleotides, but there is little information about how this array is constructed. See also A. B. Chetverin, et. al., “Sequencing of Pools of Nucleic Acids on Oligonucleotide Arrays,” BioSystems 30: 215-31 (1993); WO 92/16655 to Khrapko et. al.; Kuznetsova, et. al., “DNA Sequencing by Hybridization with Oligonucleotides Immobilized in Gel. Chemical Ligation as a Method of Expanding the Prospects for the Method,” Mol. Biol. 28(20): 290-99(1994); M. A. Livits, et. al., “Dissociation of Duplexes Formed by Hybridization of DNA with Gel-Immobilized Oligonucleotides,” J. Biomolec. Struct. & Dynam. 11(4): 783-812 (1994).

[0018] WO 89/10977 to Southern discloses the use of a support carrying an array of oligonucleotides capable of undergoing a hybridization reaction for use in analyzing a nucleic acid sample for known point mutations, genomic fingerprinting, linkage analysis, and sequence determination. The matrix is formed by laying nucleotide bases in a selected pattern on the support. This reference indicates that a hydroxyl linker group can be applied to the support with the oligonucleotides being assembled by a pen plotter or by masking.

[0019] WO 94/11530 to Cantor also relates to the use of an oligonucleotide array to carry out a process of sequencing by hybridization. The oligonucleotides are duplexes having overhanging ends to which target nucleic acids bind and are then ligated to the non-overhanging portion of the duplex. The array is constructed by using streptavidin-coated filter paper which captures biotinylated oligonucleotides assembled before attachment.

[0020] WO 93/17126 to Chetverin uses sectioned, binary oligonucleotide arrays to sort and survey nucleic acids. These arrays have a constant nucleotide sequence attached to an adjacent variable nucleotide sequence, both bound to a solid support by a covalent linking moiety. The constant nucleotide sequence has a priming region to permit amplification by PCR of hybridized stands. Sorting is then carried out by hybridization to the variable region. Sequencing, isolating, sorting, and manipulating fragmented nucleic acids on these binary arrays are also disclosed. In one embodiment with enhanced sensitivity, the immobilized oligonucleotide has a shorter complementary region hybridized to it, leaving part of the oligonucleotide uncovered. The array is then subjected to hybridization conditions so that a complementary nucleic acid anneals to the immobilized oligonucleotide. DNA ligase is then used to join the shorter complementary region and the complementary nucleic acid on the array. There is little disclosure of how to prepare the arrays of oligonucleotides.

[0021] WO 92/10588 to Fodor et. al., discloses a process for sequencing, fingerprinting, and mapping nucleic acids by hybridization to an array of oligonucleotides. The array of oligonucleotides is prepared by a very large scale immobilized polymer synthesis which permits the synthesis of large, different oligonucleotides. In this procedure, the substrate surface is functionalized and provided with a linker group by which oligonucleotides are assembled on the substrate. The regions where oligonucleotides are attached have protective groups (on the substrate or individual nucleotide subunits) which are selectively activated. Generally, this involves imaging the array with light using a mask of varying configuration so that areas exposed are deprotected. Areas which have been deprotected undergo a chemical reaction with a protected nucleotide to extend the oligonucleotide sequence where imaged. A binary masking strategy can be used to build two or more arrays at a given time. Detection involves positional localization of the region where hybridization has taken place. See also U.S. Pat. Nos. 5,324,633 and 5,424,186 to Fodor et. al., U.S. Pat. Nos. 5,143,854 and 5,405,783 to Pirrung, et. al., WO 90/15070 to Pirrung, et. al., A. C. Pease, et. al., “Light-generated Oligonucleotide Arrays for Rapid DNA Sequence Analysis”, Proc. Natl. Acad. Sci USA 91: 5022-26 (1994). K. L. Beattie, et. al., “Advances in Genosensor Research,” Clin. Chem. 41(5): 700-09 (1995) discloses attachment of previously assembled oligonucleotide probes to a solid support.

[0022] There are many drawbacks to the procedures for sequencing by hybridization to such arrays. Firstly, a very large number of oligonucleotides must be synthesized. Secondly, there is poor discrimination between correctly hybridized, properly matched duplexes and those which are mismatched. Finally, certain oligonucleotides will be difficult to hybridize to under standard conditions, with such oligonucleotides being capable of identification only through extensive hybridization studies.

[0023] The present invention is directed toward overcoming these deficiencies in the art.

### SUMMARY OF THE INVENTION

[0024] The present invention is directed to a method of designing a plurality of capture oligonucleotide probes for use on a support to which complementary oligonucleotide probes will hybridize with little mismatch, where the plural capture oligonucleotide probes have melting temperatures within a narrow range. The first step of the method involves providing a first set of a plurality of tetramers of four nucleotides linked together, where (1) each tetramer within the set differs from all other tetramers in the set by at least two nucleotide bases, (2) no two tetramers within a set are complementary to one another, (3) no tetramers within a set are palindromic or dinucleotide repeats, and (4) no tetramer within a set has one or less or three or more G or C nucleotides. Groups of 2 to 4 of the tetramers from the first set are linked together to form a collection of multimer units. From the collection of multimer units, all multimer units formed from the same tetramer and all multimer units having a melting temperature in ° C. of less than 4 times the number of tetramers forming a multimer unit are removed to form a modified collection of multimer units. The modified collection of multimer units is arranged in a list in order of melting temperature. The order of the modified collection of multimer units is randomized in 2° C. increments of melting temperature. Alternating multimer units in the list are then divided into first and second subcollections, each arranged in order of melting temperature. After the order of the second subcollection is inverted, the first collection is linked in order to the inverted second collection to form a collection of double multimer units. From the collection of double multimer units those units (1) having a melting temperature in ° C. less than 11 times the number of tetramers and more than 15 times the number of tetramers, (2) double multimer units with the same 3 tetramers linked together, and (3) double multimer units with the same 4 tetramers linked together with or without interruption are removed, to form a modified collection of double multimer units.

[0025] Another aspect of the present invention relates to an oligonucleotide array which includes a support and a collection of double multimer unit oligonucleotides at different positions on the support so that complementary oligonucleotides to be immobilized on the solid support can be captured at the different positions. The complementary oligonucleotides will hybridize, within a narrow temperature range of greater than 24° C. with little mismatch, to members of the collection of double multimer unit oligonucleotides, the double multimer unit oligonucleotides are formed from sets of tetramers where (1) each tetramer within the set differs from all other tetramers in the set by at least two nucleotide bases, (2) no two tetramers within a set are complementary to one another, and (3) no tetramers within a set are palindromic or dinucleotide repeats, and the collection of double multimer unit oligonucleotides has had the following oligonucleotides removed from it: (1) oligonucleotides having a melting temperature in ° C. less than 12.5 times the number of tetramers and more than 14 times the number of tetramers, (2) double multimer units with the same 3 tetramers linked together, and (3) multimer units with the same 4 tetramers linked together with or without interruption.

[0026] Yet another aspect of the present invention relates to a method for identifying one or more of a plurality of sequences differing by one or more single-base changes, insertions, deletions, or translocations in a plurality of target nucleotide sequences. This method involves providing a sample potentially containing one or more target nucleotide sequences with a plurality of sequence differences. A plurality of oligonucleotide probe sets are also provided with each set characterized by (a) a first oligonucleotide probe, having a target-specific portion and an addressable array-specific portion, and (b) a second oligonucleotide probe, having a target-specific portion and a detectable reporter label. The oligonucleotide probes in a particular set are suitable for ligation together when hybridized adjacent to one another on a corresponding target nucleotide sequence, but have a mismatch which interferes with such ligation when hybridized to any other nucleotide sequence present in the sample. A ligase is also provided with the sample, the plurality of oligonucleotide probe sets, and the ligase being blended to form a mixture. The mixture is subjected to one or more ligase detection reaction cycles comprising a denaturation treatment, where any hybridized oligonucleotides are separated from the target nucleotide sequences, and a hybridization treatment, where the oligonucleotide probe sets hybridize at adjacent positions in a base-specific manner to their respective target nucleotide sequences, if present in the sample, and ligate to one another to form a ligated product sequence containing (a) the addressable array-specific portion, (b) the target-specific portions connected together, and (c) the detectable reporter label. The oligonucleotide probe sets may hybridize to nucleotide sequences in the sample other than their respective target nucleotide sequences but do not ligate together due to a presence of one or more mismatches and individually separate during the denaturation treatment. A support is provided with different capture oligonucleotides immobilized at different positions, where the capture oligonucleotides have nucleotide sequences complementary to the addressable array-specific portions and are formed from a collection of double multimer unit oligonucleotides. The oligonucleotide with addressable array-specific portions will hybridize, within a narrow temperature range of more than 4 times the number of tetramers in the multimer unit with little mismatch, to members of the capture oligonuncleotides. The double multimer unit oligonucleotides are formed from sets of tetramers where (1) each tetramer within the set differs from all other tetramers in the set by at least two nucleotide bases, (2) no two tetramers within a set are complementary to one another, and (3) no tetramers within a set are palindromic or dinucleotide repeats. The collection of double multimer unit oligonucleotides has had the following oligonucleotides removed from it: (1) oligonucleotides having a melting temperature in ° C. of less than 11 times the number of tetramers and more than 15 times the number of tetramers, (2) double multimer units with the same 3 tetramers linked together, and (3) double multimer units with the same 4 tetramers linked together with or without interruption, to form a modified collection of double multimer units. After subjecting the mixture to one or more ligase detection reaction cycles, the mixture is contacted with the support under conditions effective to hybridize the addressable array-specific portions to the capture oligonucleotides in a base-specific manner, thereby capturing the addressable array-specific portions on the support at the site with the complementary capture oligonucleotide. The reporter labels of ligated product sequences captured on the support at particular sites are detected, indicating the presence of one or more target nucleotide sequences in the sample.

[0027] Another aspect of the present invention is directed to a kit for identifying one or more of a plurality of sequences differing by single-base changes, insertions, deletions, or translocations in a plurality of target nucleotide sequences. In addition, to a ligase, the kit includes a plurality oligonucleotide probe sets, each characterized by (a) a first oligonucleotide probe, having a target sequence-specific portion and an addressable array-specific portion, and (b) a second oligonucleotide probe, having a target sequence-specific portion and detectable reporter label, wherein the oligonucleotide probes in a particular set are suitable for ligation together when hybridized adjacent to one another on a respective target nucleotide sequence, but have a mismatch which interferes with such ligation when hybridized to any other nucleotide sequence, present in the sample. Also found in the kit is a support with different capture oligonucleotides immobilized at different positions, where the capture oligonucleotides have nucleotide sequences complementary to the addressable array-specific portions and are formed from a collection of double multimer unit oligonucleotides. The oligonucleotide with addressable array-specific portions will hybridize, within a narrow temperature range of greater than 4 times the number of tetramers in the multimer unit with little mismatch, to members of the capture oligonuncleotides. The double multimer unit oligonucleotides are formed from sets of tetramers where (1) each tetramer within the set differs from all other tetramers in the set by at least two nucleotide bases, (2) no two tetramers within a set are complementary to one another, and (3) no tetramers within a set are palindromic or dinucleotide repeats. The collection of double multimer unit oligonucleotides has had the following oligonucleotides removed from it: (1) oligonucleotides having a melting temperature in ° C. of less than 11 times the number of tetramers and more than 15 times then number of tetramers, (2) double multimer units with the same 3 tetramers linked together, and (3) double multimer units with the same 4 tetramers linked together with or without interruption, where the capture oligonucleotides have nucleotide sequences complementary to the addressable array-specific portions.

[0028] Another aspect of the present invention relates to a method to avoid synthesizing ligase detection reaction oligonucleotides that will inappropriately cross-hybridize to capture oligonucleotides on a solid support. This method includes comparing the ligase detection reaction oligonucleotides with the capture oligonucleotides and identifying any capture oligonucleotides likely to cross-hybridize to the ligase detection reaction oligonucleotides.

### BRIEF DESCRIPTION OF THE DRAWINGS

[0029] FIG. 1 is a flow diagram depicting polymerase chain reaction (“PCR”)/ligase detection reaction (“LDR”) processes, according to the prior art and the present invention, for detection of germline mutations, such as point mutations.

[0030] FIG. 2 is a flow diagram depicting PCR/LDR processes, according to the prior art and the present invention, for detection of cancer-associated mutations.

[0031] FIG. 3 is a schematic diagram depicting a PCR/LDR process, according to the present invention, using addresses on the allele-specific probes for detecting homo- or heterozygosity at two polymorphisms (i.e. allele differences) on the same gene.

[0032] FIG. 4 is a schematic diagram depicting a PCR/LDR process according to the present invention, using addresses on common probes for detecting homo- or heterozygosity at two polymorphisms (i.e. allele differences) on the same gene.

[0033] FIG. 5 is a schematic diagram depicting a PCR/LDR process, according to the present invention, using addresses on the allele-specific probes which distinguishes all possible bases at a given site.

[0034] FIG. 6 is a schematic diagram depicting a PCR/LDR process, according to the present invention, using addresses on the common probes which distinguishes all possible bases at a given site.

[0035] FIG. 7 is a schematic diagram depicting a PCR/LDR process, according to the present invention, using addresses on the allele-specific probes for detecting the presence of any possible base at two nearby sites.

[0036] FIG. 8 is a schematic diagram depicting a PCR/LDR process, according to the present invention, using addresses on the common probes for detecting the presence of any possible base at two nearby sites.

[0037] FIG. 9 is a schematic diagram of a PCR/LDR process, according to the present invention, using addresses on the allele-specific probes for distinguishing insertions and deletions.

[0038] FIG. 10 is a schematic diagram of a PCR/LDR process, according to the present invention, using addresses on the common probes for distinguishing insertions and deletions.

[0039] FIG. 11 is a schematic diagram of a PCR/LDR process, in accordance with the present invention, using addresses on the allele-specific probes to detect a low abundance mutation (within a codon) in the presence of an excess of normal sequence.

[0040] FIG. 12 is a schematic diagram of a PCR/LDR process, in accordance with the present invention, using addresses on the common probes to detect a low abundance mutation (within a codon) in the presence of an excess of normal sequence.

[0041] FIG. 13 is a schematic diagram of a PCR/LDR process, in accordance with the present invention, where the address is placed on the common probe and the allele differences are distinguished by different fluorescent signals F1, F2, F3, and F4.

[0042] FIG. 14 is a schematic diagram of a PCR/LDR process, in accordance with the present invention, where both adjacent and nearby alleles are detected.

[0043] FIG. 15 is a schematic diagram of a PCR/LDR process, in accordance with the present invention, where all possible single-base mutations for a single codon are detected.

[0044] FIGS. 16A-P show the p53 chip hybridization and washing conditions.

[0045] FIGS. 17A-C show two alternative formats for oligonucleotide probe capture. In FIG. 17B, the addressable array-specific portions are on the allele-specific probe. Alleles are distinguished by capture of fluorescent signals on addresses Z1 and Z2, respectively. In FIG. 17C, the addressable array-specific portions are on the common probe and alleles are distinguished by capture of fluorescent signals F1 and F2, which correspond to the two alleles, respectively.

[0046] FIG. 18 shows the chemical reactions for covalent modifications, grafting, oligomer attachments to solid supports.

[0047] FIG. 19 shows a design in accordance with the present invention using 36 tetramers differing by at least 2 bases, which can be used to create a series of unique 24-mers.

[0048] FIG. 20 shows an outline of the PCR/PCR/LDR method for detection of mutations in BRCA1 and BRCA2.

[0049] FIGS. 21A-B show the multiplex LDR detection of 3 specific mutations in BRCA1 and BRCA2 in a gel-based assay.

[0050] FIG. 22 shows an outline of multiplex LDR detection of 3 specific mutations in BRCA1 and BRCA2 using an universal DNA microarray.

[0051] FIG. 23A-H show the LDR detection of 3 specific mutations in BRCA1 and BRCA2 on an addressable universal microarray.

[0052] FIG. 24A-H show p53 chip hybridization indicating the presence of mutations in DNA from colon tumors.

[0053] FIG. 25 shows a list of 4633 capture oligonucleotides produced in accordance with the present invention.

[0054] FIG. 26 shows a list of 465 capture oligonucleotides produced in accordance with the present invention.

[0055] FIG. 27 shows a list of 96 capture oligonucleotides produced in accordance with the present invention.

[0056] FIG. 28 shows a list of 65 capture oligonucleotides produced in accordance with the present invention.

[0057] FIG. 29 shows a list of 4633 capture oligonucleotides (in the form of 20 mer PNAs) produced in accordance with the present invention.

[0058] FIG. 30 shows a melting temperature (i.e. Tm) distribution for a list of 96 capture oligonucleotides produced in accordance with the present invention.

[0059] FIG. 31 shows a melting temperature (i.e. Tm) distribution for a list of 465 capture oligonucleotides produced in accordance with the present invention.

[0060] FIG. 32 shows a melting temperature (i.e. Tm) distribution for a list of 4633 capture oligonucleotides produced in accordance with the present invention.

[0061] FIG. 33 shows a sorted melting temperature (i.e. Tm) distribution for a list of 4633 capture oligonucleotides produced in accordance with the present invention.

[0062] FIG. 34 shows the tetramer usage in the lists of 65, 96, 465, and 4633 capture oligonucleotides produced in accordance with the present invention.

[0063] FIG. 35 sets forth a computer program for comparing a target sequence with an array capture probe to insure that the latter will be designed not to hybridize to the former.

[0064] FIGS. 36A-H show the LDR detection of 7 specific mutations in K-ras on an addressable universal microarray.

### DETAILED DESCRIPTION OF THE INVENTION AND DRAWINGS

[0065] The present invention is directed to a method of designing a plurality of capture oligonucleotide probes for use on a support to which complementary oligonucleotide probes will hybridize with little mismatch, where the plural capture oligonucleotide probes have melting temperatures within a narrow range. The first step of the method involves providing a first set of a plurality of tetramers of four nucleotides linked together, where (1) each tetramer within the set differs from all other tetramers in the set by at least two nucleotide bases, (2) no two tetramers within a set are complementary to one another, (3) no tetramers within a set are palindromic or dinucleotide repeats, and (4) no tetramer within a set has one or less or three or more G or C nucleotides. Groups of 2 to 4 of the tetramers from the first set are linked together to form a collection of multimer units. From the collection of multimer units, all multimer units formed from the same tetramer and all multimer units having a melting temperature in ° C. of less than 4 times the number of tetramers forming a multimer unit are removed to form a modified collection of multimer units. The modified collection of multimer units is arranged in a list in order of melting temperature. The order of the modified collection of multimer units is randomized in 2° C. increments of melting temperature. Alternating multimer units in the list are then divided into first and second subcollections, each arranged in order of melting temperature. After the order of the second subcollection is inverted, the first collection is linked in order to the inverted second collection to form a collection of double multimer units. From the collection of double multimer units, those units (1) having a melting temperature in ° C. less than 11 times the number of tetramers and more than 15 times the number of tetramers, (2) double multimer units with the same 3 tetramers linked together, and (3) double multimer units with the same 4 tetramers linked together with or without interruption are removed, to form a modified collection of double multimer units.

[0066] Another aspect of the present invention relates to an oligonucleotide array which includes a support and a collection of double multimer unit oligonucleotides at different positions on the support so that complementary oligonucleotides to be immobilized on the solid support can be captured at the different positions. The complementary oligonucleotides will hybridize, within a narrow temperature range of greater than 24° C. with little mismatch, to members of the collection of double multimer unit oligonucleotides, the double multimer unit oligonucleotides are formed from sets of tetramers where (1) each tetramer within the set differs from all other tetramers in the set by at least two nucleotide bases, (2) no two tetramers within a set are complementary to one another, and (3) no tetramers within a set are palindromic or dinucleotide repeats, and the collection of double multimer unit oligonucleotides has had the following oligonucleotides removed from it: (1) oligonucleotides having a melting temperature in ° C. less than 12.5 times the number of tetramers and more than 14 times the number of tetramers, (2) double multimer units with the same 3 tetramers linked together, and (3) multimer units with the same 4 tetramers linked together with or without interruption.

[0067] Yet another aspect of the present invention relates to a method for identifying one or more of a plurality of sequences differing by one or more single-base changes, insertions, deletions, or translocations in a plurality of target nucleotide sequences. This method involves providing a sample potentially containing one or more target nucleotide sequences with a plurality of sequence differences. A plurality of oligonucleotide probe sets are also provided with each set characterized by (a) a first oligonucleotide probe, having a target-specific portion and an addressable array-specific portion, and (b) a second oligonucleotide probe, having a target-specific portion and a detectable reporter label. The oligonucleotide probes in a particular set are suitable for ligation together when hybridized adjacent to one another on a corresponding target nucleotide sequence, but have a mismatch which interferes with such ligation when hybridized to any other nucleotide sequence present in the sample. A ligase is also provided with the sample, the plurality of oligonucleotide probe sets, and the ligase being blended to form a mixture. The mixture is subjected to one or more ligase detection reaction cycles comprising a denaturation treatment, where any hybridized oligonucleotides are separated from the target nucleotide sequences, and a hybridization treatment, where the oligonucleotide probe sets hybridize at adjacent positions in a base-specific manner to their respective target nucleotide sequences, if present in the sample, and ligate to one another to form a ligated product sequence containing (a) the addressable array-specific portion, (b) the target-specific portions connected together, and (c) the detectable reporter label. The oligonucleotide probe sets may hybridize to nucleotide sequences in the sample other than their respective target nucleotide sequences but do not ligate together due to a presence of one or more mismatches and individually separate during the denaturation treatment. A support is provided with capture oligonucleotides immobilized at different positions, where the capture oligonucleotides have nucleotide sequences complementary to the addressable array-specific portions and are formed from a collection of double multimer unit oligonucleotides. The oligonucleotide with addressable array-specific portions will hybridize, within a narrow temperature range of more than 4 times the number of tetramers in the multimer unit with little mismatch, to members of the capture oligonuncleotides. The double multimer unit oligonucleotides are formed from sets of tetramers where (1) each tetramer within the set differs from all other tetramers in the set by at least two nucleotide bases, (2) no two tetramers within a set are complementary to one another, and (3) no tetramers within a set are palindromic or dinucleotide repeats. The collection of double multimer unit oligonucleotides has had the following oligonucleotides removed from it: (1) oligonucleotides having a melting temperature in ° C. of less than 11 times the number of tetramers and more than 15 times the number of tetramers, (2) double multimer units with the same 3 tetramers linked together, and (3) double multimer units with the same 4 tetramers linked together with or without interruption, to form a modified collection of double multimer units. After subjecting the mixture to one or more ligase detection reaction cycles, the mixture is contacted with the support under conditions effective to hybridize the addressable array-specific portions to the capture oligonucleotides in a base-specific manner, thereby capturing the addressable array-specific portions on the support at the site with the complementary capture oligonucleotide. The reporter labels of ligated product sequences captured on the support at particular sites are detected, indicating the presence of one or more target nucleotide sequences in the sample.

[0068] Another aspect of the present invention is directed to a kit for identifying one or more of a plurality of sequences differing by single-base changes, insertions, deletions, or translocations in a plurality of target nucleotide sequences. In addition, to a ligase, the kit includes a plurality oligonucleotide probe sets, each characterized by (a) a first oligonucleotide probe, having a target sequence-specific portion and an addressable array-specific portion, and (b) a second oligonucleotide probe, having a target sequence-specific portion and detectable reporter label, wherein the oligonucleotide probes in a particular set are suitable for ligation together when hybridized adjacent to one another on a respective target nucleotide sequence, but have a mismatch which interferes with such ligation when hybridized to any other nucleotide sequence, present in the sample. Also found in the kit is a support with different capture oligonucleotides immobilized at different positions, where the capture oligonucleotides have nucleotide sequences complementary to the addressable array-specific portions and are formed from a collection of double multimer unit oligonucleotides. The oligonucleotide with addressable array-specific portions will hybridize, within a narrow temperature range of greater than 4 times the number of tetramers in the multimer unit with little mismatch, to members of the capture oligonuncleotides. The double multimer unit oligonucleotides are formed from sets of tetramers where (1) each tetramer within the set differs from all other tetramers in the set by at least two nucleotide bases, (2) no two tetramers within a set are complementary to one another, and (3) no tetramers within a set are palindromic or dinucleotide repeats. The collection of double multimer unit oligonucleotides has had the following oligonucleotides removed from it: (1) oligonucleotides having a melting temperature in ° C. of less than 11 times the number of tetramers and more than 15 times then number of tetramers, (2) double multimer units with the same 3 tetramers linked together, and (3) double multimer units with the same 4 tetramers linked together with or without interruption, where the capture oligonucleotides have nucleotide sequences complementary to the addressable array-specific portions.

[0069] Often, a number of different single-base mutations, insertions, or deletions may occur at the same nucleotide position of the sequence of interest. The method provides for having an oligonucleotide set, where the second oligonucleotide probe is common and contains the detectable label, and the first oligonucleotide probe has different addressable array-specific portions and target-specific portions. The first oligonucleotide probe is suitable for ligation to a second adjacent oligonucleotide probe at a first ligation junction, when hybridized without mismatch, to the sequence in question. Different first adjacent oligonucleotide probes would contain different discriminating base(s) at the junction where only a hybridization without mismatch at the junction would allow for ligation. Each first adjacent oligonucleotide would contain a different addressable array-specific portion, and, thus, specific base changes would be distinguished by capture at different addresses. In this scheme, a plurality of different capture oligonucleotides are attached at different locations on the solid support for multiplex detection of additional nucleic acid sequences differing from other nucleic acids by at least a single base. Alternatively, the first oligonucleotide probe contains common addressable array-specific portions, and the second oligonucleotide probes have different detectable labels and target-specific portions.

[0070] Such arrangements permit multiplex detection of additional nucleic acid sequences differing from other nucleic acids by at least a single base. The nucleic acids sequences can be on the same or different alleles when carrying out such multiplex detection.

[0071] The present invention also relates to a kit for carrying out the method of the present invention which includes the ligase, the plurality of different oligonucleotide probe sets, and the solid support with immobilized capture oligonucleotides. Primers for preliminary amplification of the target nucleotide sequences may also be included in the kit. If amplification is by polymerase chain reaction, polymerase may also be included in the kit.

[0072] FIGS. 1 and 2 show flow diagrams of the process of the present invention compared to a prior art ligase detection reaction utilizing capillary or gel electrophoresis/fluorescent quantification. FIG. 1 relates to detection of a germline mutation detection, while FIG. 2 shows the detection of cancer.

[0073] FIG. 1 depicts the detection of a germline point mutation, such as the p53 mutations responsible for Li-Fraumeni syndrome. In step 1, after DNA sample preparation, exons 5-8 are PCR amplified using Taq (i.e. Thermus aquaticus) polymerase under hot start conditions. At the end of the reaction, Taq polymerase is degraded by treatment with Proteinase K. Products are diluted 20-fold in step 2 into fresh LDR buffer containing allele-specific and common LDR probes. A tube generally contains about 500 fmoles of each primer. In step 3, the ligase detection reaction is initiated by addition of Taq ligase under hot start conditions. The LDR probes ligate to their adjacent probes only in the presence of target sequence which gives perfect complementarity at the junction site. The products may be detected in two different formats. In the first format 4a., used in the prior art, fluorescently-labeled LDR probes contain different length poly A or hexaethylene oxide tails. Thus, each LDR product, resulting from ligation to normal DNA with a slightly different mobility, yields a ladder of peaks. A germline mutation would generate a new peak on the electrophorogram. The size of the new peak will approximate the amount of the mutation present in the original sample; 0% for homozygous normal, 50% for heterozygous carrier, or 100% for homozygous mutant. In the second format 4b., in accordance with the present invention, each allele-specific probe contains e.g., 24 additional nucleotide bases on their 5′ ends. These sequences are unique addressable sequences which will specifically hybridize to their complementary address sequences on an addressable array. In the LDR reaction, each allele-specific probe can ligate to its adjacent fluorescently labeled common probe in the presence of the corresponding target sequence. Wild type and mutant alleles are captured on adjacent addresses on the array. Unreacted probes are washed away. The black dots indicate 100% signal for the wild type allele. The white dots indicate 0% signal for the mutant alleles. The shaded dots indicate the one position of germline mutation, 50% signal for each allele.

[0074] FIG. 2 depicts detection of somatic cell mutations in the p53 tumor suppressor gene but is general for all low sensitivity mutation detection. In step 1, DNA samples are prepared and exons 5-9 are PCR amplified as three fragments using fluorescent PCR primers. This allows for fluorescent quantification of PCR products in step 2 using capillary or gel electrophoresis. In step 3, the products are spiked with a 1/100 dilution of marker DNA (for each of the three fragments). This DNA is homologous to wild type DNA, except it contains a mutation which is not observed in cancer cells, but which may be readily detected with the appropriate LDR probes. The mixed DNA products in step 4 are diluted 20-fold into buffer containing all the LDR probes which are specific only to mutant or marker alleles. In step 5, the ligase detection reaction is initiated by addition of Taq ligase under hot start conditions. The LDR probes ligate to their adjacent probes only in the presence of target sequences which give perfect complementarity at the junction site. The products may be detected in the same two formats described in FIG. 1. In the format of step 6a, which is used in the prior art, products are separated by capillary or gel electrophoresis, and fluorescent signals are quantified. Ratios of mutant peaks to marker peaks give approximate amount of cancer mutations present in the original sample divided by 100. In the format of step 6b, in accordance with the present invention, products are detected by specific hybridization to complementary sequences on an addressable array. Ratios of fluorescent signals in mutant dots to marker dots give the approximate amount of cancer mutations present in the original sample divided by 100.

[0075] The ligase detection reaction process, in accordance with the present invention, is best understood by referring to FIGS. 3-15. It is described generally in WO 90/17239 to Barany et al., F. Barany et al., “Cloning, Overexpression and Nucleotide Sequence of a Thermostable DNA Ligase-encoding Gene,” Gene, 109: 1-11 (1991), and F. Barany, “Genetic Disease Detection and DNA Amplification Using Cloned Thermostable Ligase,” Proc. Natl. Acad. Sci. USA, 88: 189-193 (1991), the disclosures of which are hereby incorporated by reference. In accordance with the present invention, the ligase detection reaction can use 2 sets of complementary oligonucleotides. This is known as the ligase chain reaction which is described in the 3 immediately preceding references, which are hereby incorporated by reference. Alternatively, the ligase detection reaction can involve a single cycle which is known as the oligonucleotide ligation assay. See Landegren, et al., “A Ligase-Mediated Gene Detection Technique,” Science 241: 1077-80 (1988); Landegren, et al., “DNA Diagnostics—Molecular Techniques and Automation,” Science 242: 229-37 (1988); and U.S. Pat. No. 4,988,617 to Landegren, et al.

[0076] During the ligase detection reaction phase of the process, the denaturation treatment is carried out at a temperature of 80-105° C., while hybridization takes place at 50-85° C. Each cycle comprises a denaturation treatment and a thermal hybridization treatment which in total is from about one to five minutes long. Typically, the ligation detection reaction involves repeatedly denaturing and hybridizing for 2 to 50 cycles. The total time for the ligase detection reaction phase of the process is 1 to 250 minutes.

[0077] The oligonucleotide probe sets can be in the form of ribonucleotides, deoxynucleotides, modified ribonucleotides, modified deoxyribonucleotides, peptide nucleotide analogues, modified peptide nucleotide analogues, modified phosphate-sugar-backbone oligonucleotides, nucleotide analogs, and mixtures thereof.

[0078] In one variation, the oligonucleotides of the oligonucleotide probe sets each have a hybridization or melting temperature (i.e. Tₘ) of 66-70° C. These oligonucleotides are 20-28 nucleotides long.

[0079] It may be desirable to destroy chemically or enzymatically unconverted LDR oligonucleotide probes that contain addressable nucleotide array-specific portions prior to capture of the ligation products on a DNA array. Such unconverted probes will otherwise compete with ligation products for binding at the addresses on the array of the solid support which contain complementary sequences. Destruction can be accomplished by utilizing an exonuclease, such as exonuclease III (L-H Guo and R. Wu, Methods in Enzymology 100: 60-96 (1985), which is hereby incorporated by reference) in combination with LDR probes that are blocked at the ends and not involved with ligation of probes to one another. The blocking moiety could be a reporter group or a phosphorothioate group. T. T. Nikiforow, et al., “The Use of Phosphorothioate Primers and Exonuclease Hydrolysis for the Preparation of Single-stranded PCR Products and their Detection by Solid-phase Hybridization,” PCR Methods and Applications, 3: p. 285-291 (1994), which is hereby incorporated by reference. After the LDR process, unligated probes are selectively destroyed by incubation of the reaction mixture with the exonuclease. The ligated probes are protected due to the elimination of free 3′ ends which are required for initiation of the exonuclease reaction. This approach results in an increase in the signal-to-noise ratio, especially where the LDR reaction forms only a small amount of product. Since unligated oligonucleotides compete for capture by the capture oligonucleotide, such competition with the ligated oligonucleotides lowers the signal. An additional advantage of this approach is that unhybridized label-containing sequences are degraded and, therefore, are less able to cause a target-independent background signal, because they can be removed more easily from the DNA array by washing.

[0080] The oligonucleotide probe sets, as noted above, have a reporter label suitable for detection. Useful labels include chromophores, fluorescent moieties, enzymes, antigens, heavy metals, magnetic probes, dyes, phosphorescent groups, radioactive materials, chemiluminescent moieties, and electrochemical detecting moieties. The capture oligonucleotides can be in the form of ribonucleotides, deoxyribonucleotides, modified ribonucleotides, modified deoxyribonucleotides, peptide nucleotide analogues, modified peptide nucleotide analogues, modified phosphate-sugar backbone oligonucleotides, nucleotide analogues, and mixtures thereof. Where the process of the present invention involves use of a plurality of oligonucleotide sets, the second oligonucleotide probes can be the same, while the addressable array-specific portions of the first oligonucleotide probes differ. Alternatively, the addressable array-specific portions of the first oligonucleotide probes may be the same, while the reporter labels of the second oligonucleotide probes are different.

[0081] Prior to the ligation detection reaction phase of the present invention, the sample is preferably amplified by an initial target nucleic acid amplification procedure. This increases the quantity of the target nucleotide sequence in the sample. For example, the initial target nucleic acid amplification may be accomplished using the polymerase chain reaction process, self-sustained sequence replication, or Q-β replicase-mediated RNA amplification. The polymerase chain reaction process is the preferred amplification procedure and is fully described in H. Erlich, et. al., “Recent Advances in the Polymerase Chain Reaction,” Science 252: 1643-50 (1991); M. Innis, et. al., PCR Protocols: A Guide to Methods and Applications, Academic Press: New York (1990); and R. Saiki, et. al., “Primer-directed Enzymatic Amplification of DNA with a Thermostable DNA Polymerase,” Science 239: 487-91 (1988), which are hereby incorporated by reference. J. Guatelli, et. al., “Isothermal, in vitro Amplification of Nucleic Acids by a Multienzyme Reaction Modeled After Retroviral Replication,” Proc. Natl. Acad. Sci. USA 87: 1874-78 (1990), which is hereby incorporated by reference, describes the self-sustained sequence replication process. The Q-β replicase-mediated RNA amplification is disclosed in F. Kramer, et. al., “Replicatable RNA Reporters,” Nature 339: 401-02 (1989), which is hereby incorporated by reference.

[0082] The use of the polymerase chain reaction process and then the ligase detection process, in accordance with the present invention, is shown in FIG. 3. Here, homo- or heterozygosity at two polymorphisms (i.e. allele differences) are on the same gene. Such allele differences can alternatively be on different genes.

[0083] As shown in FIG. 3, the target nucleic acid, when present in the form of a double stranded DNA molecule is denatured to separate the strands. This is achieved by heating to a temperature of 80-105° C. Polymerase chain reaction primers are then added and allowed to hybridize to the strands, typically at a temperature of 20-85° C. A thermostable polymerase (e.g., Thermus aquaticus polymerase) is also added, and the temperature is then adjusted to 50-85° C. to extend the primer along the length of the nucleic acid to which the primer is hybridized. After the extension phase of the polymerase chain reaction, the resulting double stranded molecule is heated to a temperature of 80-105° C. to denature the molecule and to separate the strands. These hybridization, extension, and denaturation steps may be repeated a number of times to amplify the target to an appropriate level.

[0084] Once the polymerase chain reaction phase of the process is completed, the ligation detection reaction phase begins, as shown in FIG. 3. After denaturation of the target nucleic acid, if present as a double stranded DNA molecule, at a temperature of 80-105° C., preferably 94° C., ligation detection reaction oligonucleotide probes for one strand of the target nucleotide sequence are added along with a ligase (for example, as shown in FIG. 3, a thermostable ligase like Thermus aquaticus ligase). The oligonucleotide probes are then allowed to hybridize to the target nucleic acid molecule and ligate together, typically, at a temperature of 45-85° C., preferably, 65° C. When there is perfect complementarity at the ligation junction, the oligonucleotides can be ligated together. Where the variable nucleotide is T or A, the presence of T in the target nucleotide sequence will cause the oligonucleotide probe with the addressable array-specific portion Z1 to ligate to the oligonucleotide probe with the reporter label F, and the presence of A in the target nucleotide sequence will cause the oligonucleotide probe with the addressable array-specific portion Z2 to ligate to the oligonucleotide probe with reporter label F. Similarly, where the variable nucleotide is A or G, the presence of T in the target nucleotide sequence will cause the oligonucleotide probe with addressable array-specific portion Z4 to ligate to the oligonucleotide probe with the reporter label F, and the presence of C in the target nucleotide sequence will cause the oligonucleotide probe with the addressable array-specific portion Z3 to ligate to the oligonucleotide probe with reporter label F. Following ligation, the material is again subjected to denaturation to separate the hybridized strands. The hybridization/ligation and denaturation steps can be carried through one or more cycles (e.g., 1 to 50 cycles) to amplify the target signal. Fluorescent ligation products (as well as unligated oligonucleotide probes having an addressable array-specific portion) are captured by hybridization to capture probes complementary to portions Z1, Z2, Z3, and Z4 at particular addresses on the addressable arrays. The presence of ligated oligonucleotides is then detected by virtue of the label F originally on one of the oligonucleotides. In FIG. 3, ligated product sequences hybridize to the array at addresses with capture oligonucleotides complementary to addressable array-specific portions Z1 and Z3, while unligated oligonucleotide probes with addressable array-specific portions Z2 and Z4 hybridize to their complementary capture oligonucleotides. However, since only the ligated product sequences have label F, only their presence is detected.

[0085] FIG. 4 is similar to FIG. 3 except that in FIG. 4, the common oligonucleotide probe has an address-specific portion, while the allele-specific probes have different labels.

[0086] FIG. 5 is a flow diagram of a PCR/LDR process, in accordance with the present invention, which distinguishes any possible base at a given site. Appearance of fluorescent signal at the addresses complementary to addressable array-specific portions Z1, Z2, Z3, and Z4 indicates the presence of A, G, C, and T alleles in the target nucleotide sequence, respectively. Here, the presence of the A and C alleles in the target nucleotide sequences is indicated due to the fluorescence at the addresses on the solid support with capture oligonucleotide probes complementary to portions Z1 and Z3, respectively. Note that in FIG. 5 the addressable array-specific portions are on the discriminating oligonucleotide probes, and the discriminating base is on the 3′ end of these probes.

[0087] FIG. 6 is similar to FIG. 5, except that in FIG. 6, the common oligonucleotide probe has the address-specific portion, while the allele-specific probes have different labels.

[0088] FIG. 7 is a flow diagram of a PCR/LDR process, in accordance with the present invention, for detecting the presence of any possible base at two nearby sites. Here, the LDR probes are able to overlap, yet are still capable of ligating provided there is perfect complementarity at the junction. This distinguishes LDR from other approaches, such as allele-specific PCR where overlapping primers would interfere with one another. In FIG. 7, the first nucleotide position is heterozygous at the A and C alleles, while the second nucleotide position is heterozygous to the G, C, and T alleles. As in FIG. 5, the addressable array-specific portions are on the discriminating oligonucleotide probes, and the discriminating base is on the 3′ end of these probes. The reporter group (e.g., the fluorescent label) is on the 3′ end of the common oligonucleotide probes. This is possible for example with the 21 hydroxylase gene, where each individual has 2 normal and 2 pseudogenes, and, at the intron 2 splice site (nucleotide 656), there are 3 possible single bases (G, A, and C). Also, this can be used to detect low abundance mutations in HIV infections which might indicate emergence of drug resistant (e.g., to AZT) strains. Returning to FIG. 7, appearance of fluorescent signal at the addresses complementary to addressable array-specific portions Z1, Z2, Z3, Z4, Z5, Z6, Z7, and Z8 indicates the presence of the A, G, C, and T, respectively, in the site heterozygous at the A and C alleles, and A, G, C, and T, respectively, in the site heterozygous at the G, C, and T alleles.

[0089] FIG. 8 is similar to FIG. 7, except that in FIG. 8, the common oligonucleotide probes have the address-specific portions, while the allele specific probes have different labels.

[0090] FIG. 9 is a flow diagram of a PCR/LDR process, in accordance with the present invention, where insertions (top left set of probes) and deletions (bottom right set of probes) are distinguished. On the left, the normal sequence contains 5 A's in a polyA tract. The mutant sequence has an additional 2As inserted into the tract. Therefore, the LDR products with addressable array-specific portions Z1 (representing the normal sequence) and Z3 (representing a 2 base pair insertion) would be fluorescently labeled by ligation to the common probe. While the LDR process (e.g., using a thermostable ligase enzyme) has no difficulty distinguishing single base insertions or deletions in mononucleotide repeats, allele-specific PCR is unable to distinguish such differences, because the 3′ base remains the same for both alleles. On the right, the normal sequence is a (CA)₅ repeat (i.e. CACACACACA). The mutant contains two less CA bases than the normal sequence (i.e. CACACA). These would be detected as fluorescent LDR products at the addressable array-specific portions Z8 (representing the normal sequence) and Z6 (representing the 2 CA deletion) addresses. The resistance of various infectious agents to drugs can also be determined using the present invention. In FIG. 9, the presence of ligated product sequences, as indicated by fluorescent label F, at the address having capture oligonucleotides complementary to Z1 and Z3 demonstrates the presence of both the normal and mutant poly A sequences. Similarly, the presence of ligated product sequences, as indicated by fluorescent label F, at the address having capture oligonucleotides complementary to Z6 and Z8 demonstrates the presence of both the normal CA repeat and a sequence with one repeat unit deleted.

[0091] FIG. 10 is similar to FIG. 9, except that in FIG. 10, the common oligonucleotide probes have the address-specific portions, while the allele-specific probes have different labels.

[0092] FIG. 11 is a flow diagram of a PCR/LDR process, in accordance with the present invention, using addressable array-specific portions to detect a low abundance mutation in the presence of an excess of normal sequence. FIG. 1I shows codon 12 of the K-ras gene, sequence GGT, which codes for glycine (“Gly”). A small percentage of the cells contain the G to A mutation in GAT, which codes for aspartic acid (“Asp”). The LDR probes for wild-type (i.e. normal sequences) are missing from the reaction. If the normal LDR probes (with the discriminating base=G) were included, they would ligate to the common probes and overwhelm any signal coming from the mutant target Instead, as shown in FIG. 11, the existence of a ligated product sequence with fluorescent label F at the address with a capture oligonucleotide complementary to addressable array-specific portion Z4 indicates the presence of the aspartic acid encoding mutant.

[0093] FIG. 12 is similar to FIG. 11, except that in FIG. 12, the common oligonucleotide probes have address-specific portions, while the allele-specific probes have different labels.

[0094] FIG. 13 is a flow diagram of a PCR/LDR process, in accordance with the present invention, where the addressable array-specific portion is placed on, the common oligonucleotide probe, while the discriminating oligonucleotide probe has the reporter label. Allele differences are distinguished by different fluorescent signals, F1, F2, F3, and F4. This mode allows for a more dense use of the arrays, because each position is predicted to light up with some group. It has the disadvantage of requiring fluorescent groups which have minimal overlap in their emission spectra and will require multiple scans. It is not ideally suitable for detection of low abundance alleles (e.g., cancer associated mutations).

[0095] FIG. 14 is a flow diagram of a PCR/LDR process, in accordance with the present invention, where both adjacent and nearby alleles are detected. The adjacent mutations are right next to each other, and one set of oligonucleotide probes discriminates the bases on the 3′ end of the junction (by use of different addressable array-specific portions Z1, Z2, Z3, and Z4), while the other set of oligonucleotide probes discriminates the bases on the 5′ end of the junction (by use of different fluorescent reporter labels F1, F2, F3, and F4). In FIG. 14, codons in a disease gene (e.g. CFTR for cystic fibrosis) encoding Gly and arginine (“Arg”), respectively, are candidates for germline mutations. The detection results in FIG. 14 show the Gly (GGA; indicated by the ligated product sequence having portion Z2 and label F2) has been mutated to glutamic acid (“Glu”) (GAA; indicated by the ligated product sequence having portion Z2 and label F1), and the Arg (CGG; indicated by the ligated product sequence having portion Z7 and label F2) has been mutated to tryptophan (“Trp”) (TGG; indicated by the ligated product sequence with portion Z8 and label F2). Therefore, the patient is a compound heterozygous individual (i.e. with allele mutations in both genes) and will have the disease.

[0096] FIG. 15 is a flow diagram of a PCR/LDR process, in accordance with the present invention, where all possible single-base mutations for a single codon are detected. Most amino acid codons have a degeneracy in the third base, thus the first two positions can determine all the possible mutations at the protein level. These amino acids include arginine, leucine, serine, threonine, proline, alanine, glycine, and valine. However, some amino acids are determined by all three bases in the codon and, thus, require the oligonucleotide probes to distinguish mutations in 3 adjacent positions. By designing four oligonucleotide probes containing the four possible bases in the penultimate position to the 3′ end, as well as designing an additional four capture oligonucleotides containing the four possible bases at the 3′ end, as shown in FIG. 15, this problem has been solved. The common oligonucleotide probes with the reporter labels only have two fluorescent groups which correspond to the codon degeneracies and distinguish between different ligated product sequences which are captured at the same array address. For example, as shown in FIG. 15, the presence of a glutamine (“Gln”) encoding codon (i.e., CAA and CAG) is indicated by the presence of a ligated product sequence containing portion Z1 and label F2. Likewise, the existence of a Gln to histidine (“His”) encoding mutation (coded by the codon CAC) is indicated by the presence of ligated product sequences with portion Z1 and label F2 and with portion Z7 and label F2 There is an internal redundancy built into this assay due to the fact that primers Z1 and Z7 have the identical sequence.

[0097] A particularly important aspect of the present invention is its capability to quantify the amount of target nucleotide sequence in a sample. This can be achieved in a number of ways by establishing standards which can be internal (i.e. where the standard establishing material is amplified and detected with the sample) or external (i.e. where the standard establishing material is not amplified, and is detected with the sample).

[0098] In accordance with one quantification method, the signal generated by the reporter label, resulting from capture of ligated product sequences produced from the sample being analyzed, are detected. The strength of this signal is compared to a calibration curve produced from signals generated by capture of ligated product sequences in samples with known amounts of target nucleotide sequence. As a result, the amount of target nucleotide sequence in the sample being analyzed can be determined. This technique involves use of an external standard.

[0099] Another quantification method, in accordance with the present invention, relates to an internal standard. Here, a known amount of one or more marker target nucleotide sequences are added to the sample. In addition, a plurality of marker-specific oligonucleotide probe sets are added along with the ligase, the previously-discussed oligonucleotide probe sets, and the sample to a mixture. The marker-specific oligonucleotide probe sets have (1) a first oligonucleotide probe with a target-specific portion complementary to the marker target nucleotide sequence and an addressable array-specific portion complementary to capture oligonucleotides on the support and (2) a second oligonucleotide probe with a target-specific portion complementary to the marker target nucleotide sequence and a detectable reporter label. The oligonucleotide probes in a particular marker-specific oligonucleotide set are suitable for ligation together when hybridized adjacent to one another on a corresponding marker target nucleotide sequence. However, there is a mismatch which interferes with such ligation when hybridized to any other nucleotide sequence present in the sample or added marker sequences. The presence of ligated product sequences captured on the support is identified by detection of reporter labels. The amount of target nucleotide sequences in the sample is then determined by comparing the amount of captured ligated product generated from known amounts of marker target nucleotide sequences with the amount of other ligated product sequences captured.

[0100] Another quantification method in accordance with the present invention involves analysis of a sample containing two or more of a plurality of target nucleotide sequences with a plurality of sequence differences. Here, ligated product sequences corresponding to the target nucleotide sequences are detected and distinguished by any of the previously-discussed techniques. The relative amounts of the target nucleotide sequences in the sample are then quantified by comparing the relative amounts of captured ligated product sequences generated. This provides a quantitative measure of the relative level of the target nucleotide sequences in the sample.

[0101] The ligase detection reaction process phase of the present invention can be preceded by the ligase chain reaction process to achieve oligonucleotide product amplification. This process is fully described in F. Barany, et. al., “Cloning, Overexpression and Nucleotide Sequence of a Thermostable DNA Ligase-encoding Gene,” Gene 109: 1-11 (1991) and F. Barany, “Genetic Disease Detection and DNA Amplification Using Cloned Thermostable Ligase,” Proc. Natl. Acad. Sci. USA 88: 189-93 (1991), which are hereby incorporated by reference. Instead of using the ligase chain reaction to achieve amplification, a transcription-based amplifying procedure can be used.

[0102] The preferred thermostable ligase is that derived from Thermus aquaticus. This enzyme can be isolated from that organism. M. Takahashi, et al., “Thermophillic DNA Ligase,” J. Biol. Chem. 259: 10041-47 (1984), which is hereby incorporated by reference. Alternatively, it can be prepared recombinantly. Procedures for such isolation as well as the recombinant production of Thermus aquaticus ligase (and Thermus themophilus ligase) are disclosed in WO 90/17239 to Barany, et. al., and F. Barany, et al., “Cloning, Overexpression and Nucleotide Sequence of a Thermostable DNA-Ligase Encoding Gene,” Gene 109: 1-11 (1991), which are hereby incorporated by reference. These references contain complete sequence information for this ligase as well as the encoding DNA. Other suitable ligases include E. coli ligase, T4 ligase, Thermus sp. AK16 ligase, Aquifex aeolicus ligase, Thermotoga maritima ligase, and Pyrococcus ligase.

[0103] The ligation amplification mixture may include a carrier DNA, such as salmon sperm DNA.

[0104] The hybridization step, which is preferably a thermal hybridization treatment, discriminates between nucleotide sequences based on a distinguishing nucleotide at the ligation junctions. The difference between the target nucleotide sequences can be, for example, a single nucleic acid base difference, a nucleic acid deletion, a nucleic acid insertion, or rearrangement. Such sequence differences involving more than one base can also be detected. Preferably, the oligonucleotide probe sets have substantially the same length so that they hybridize to target nucleotide sequences at substantially similar hybridization conditions. As a result, the process of the present invention is able to detect infectious diseases, genetic diseases, and cancer. It is also useful in environmental monitoring, forensics, and food science.

[0105] A wide variety of infectious diseases can be detected by the process of the present invention. Typically, these are caused by bacterial, viral, parasite, and fungal infectious agents. The resistance of various infectious agents to drugs can also be determined using the present invention.

[0106] Bacterial infectious agents which can be detected by the present invention include Escherichia coli, Salmonella, Shigella, Klebsiella, Pseudomonas, Listeria monocytogenes, Mycobacterium tuberculosis, Mycobacterium avium-intracellulare, Yersinia, Francisella, Pasteurella, Brucella, Clostridia, Bordetella pertussis, Bacteroides, Staphylococcus aureus, Streptococcus pneumonia, B-Hemolytic strep., Corynebacteria, Legionella, Mycoplasma, Ureaplasma, Chlamydia, Neisseria gonorrhea, Neisseria meningitides, Hemophilus influenza, Enterococcus faecalis, Proteus vulgaris, Proteus mirabilis, Helicobacter pylori, Treponema palladium, Borrelia burgdorferi, Borrelia recurrentis, Rickettsial pathogens, Nocardia, and Acitnomycetes.

[0107] Fungal infectious agents which can be detected by the present invention include Cryptococcus neoformans, Blastomyces dermatitidis, Histoplasma capsulatum, Coccidioides immitis, Paracoccicioides brasiliensis, Candida albicans, Aspergillus fumigautus, Phycomycetes (Rhizopus), Sporothrix schenckii, Chromomycosis, and Maduromycosis.

[0108] Viral infectious agents which can be detected by the present invention include human immunodeficiency virus, human T-cell lymphocytotrophic virus, hepatitis viruses (e.g., Hepatitis B Virus and Hepatitis C Virus), Epstein-Barr Virus, cytomegalovirus, human papillomaviruses, orthomyxo viruses, paramyxo viruses, adenoviruses, corona viruses, rhabdo viruses, polio viruses, toga viruses, bunya viruses, arena viruses, rubella viruses, and reo viruses.

[0109] Parasitic agents which can be detected by the present invention include Plasmodium falciparum, Plasmodium malaria, Plasmodium vivax, Plasmodium ovale, Onchoverva volvulus, Leishmania, Trypanosoma spp., Schistosoma spp., Entamoeba histolytica, Cryptosporidum, Giardia spp., Trichimonas spp., Balatidium coli, Wuchereria bancrofti, Toxoplasma spp., Enterobius vermicularis, Ascaris lumbricoides, Trichuris trichiura, Dracunculus medinesis, trematodes, Diphyllobothrium latum, Taenia spp., Pneumocystis carinii, and Necator americanis.

[0110] The present invention is also useful for detection of drug resistance by infectious agents. For example, vancomycin-resistant Enterococcus faecium, methicillin-resistant Staphylococcus aureus, penicillin-resistant Streptococcus pneumoniae, multi-drug resistant Mycobacterium tuberculosis, and AZT-resistant human immunodeficiency virus can all be identified with the present invention.

[0111] Genetic diseases can also be detected by the process of the present invention. This can be carried out by prenatal screening for chromosomal and genetic aberrations or post natal screening for genetic diseases. Examples of detectable genetic diseases include: 21 hydroxylase deficiency, cystic fibrosis, Fragile X Syndrome, Turner Syndrome, Duchenne Muscular Dystrophy, Down Syndrome or other trisomies, heart disease, single gene diseases, HLA typing, phenylketonuria, sickle cell anemia, Tay-Sachs Syndrome, thalassemia, Klinefelter's Syndrome, Huntington's Disease, autoimmune diseases, lipidosis, obesity defects, hemophilia, inborn errors in metabolism, and diabetes.

[0112] Cancers which can be detected by the process of the present invention generally involve oncogenes, tumor suppressor genes, or genes involved in DNA amplification, replication, recombination, or repair. Examples of these include: BRCA1 gene, p53 gene, Familial polyposis coli, Her2/Neu amplification, Bcr/Ab1, K-ras gene, human papillomavirus Types 16 and 18, leukemia, colon cancer, breast cancer, lung cancer, prostate cancer, brain tumors, central nervous system tumors, bladder tumors, melanomas, liver cancer, osteosarcoma and other bone cancers, testicular and ovarian carcinomas, ENT tumors, and loss of heterozygosity.

[0113] In the area of environmental monitoring, the present invention can be used for detection, identification, and monitoring of pathogenic and indigenous microorganisms in natural and engineered ecosystems and microcosms such as in municipal waste water purification systems and water reservoirs or in polluted areas undergoing bioremediation. It is also possible to detect plasmids containing genes that can metabolize xenobiotics, to monitor specific target microorganisms in population dynamic studies, or either to detect, identify, or monitor genetically modified microorganisms in the environment and in industrial plants.

[0114] The present invention can also be used in a variety or forensic areas, including for human identification for military personnel and criminal investigation, paternity testing and family relation analysis, HLA compatibility typing, and screening blood, sperm, or transplantation organs for contamination.

[0115] In the food and feed industry, the present invention has a wide variety of applications. For example, it can be used for identification and characterization of production organisms such as yeast for production of beer, wine, cheese, yogurt, bread, etc. Another area of use is with regard to quality control and certification of products and processes (e.g., livestock, pasteurization, and meat processing) for contaminants. Other uses include the characterization of plants, bulbs, and seeds for breeding purposes, identification of the presence of plant-specific pathogens, and detection and identification of veterinary infections.

[0116] Desirably, the oligonucleotide probes are suitable for ligation together at a ligation junction when hybridized adjacent to one another on a corresponding target nucleotide sequence due to perfect complementarity at the ligation junction. However, when the oligonucleotide probes in the set are hybridized to any other nucleotide sequence present in the sample, there is a mismatch at a base at the ligation junction which interferes with ligation. Most preferably, the mismatch is at the base adjacent the 3′ base at the ligation junction. Alternatively, the mismatch can be at the bases adjacent to bases at the ligation junction.

[0117] The process of the present invention is able to detect the first and second nucleotide sequences in the sample in an amount of 100 attomoles to 250 femtomoles. By coupling the LDR step with a primary polymerase-directed amplification step, the entire process of the present invention is able to detect target nucleotide sequences in a sample containing as few as a single molecule. Furthermore, PCR amplified products, which often are in the picomole amounts, may easily be diluted within the above range. The ligase detection reaction achieves a rate of formation of mismatched ligated product sequences which is less than 0.005 of the rate of formation of matched ligated product sequences.

[0118] Once the ligation phase of the process is completed, the capture phase is initiated. During the capture phase of the process, the mixture is contacted with the solid support at a temperature of 25-90° C., preferably 60-80° C., and for a time period of 10-180 minutes, preferably up to 60 minutes. Hybridizations may be accelerated or improved by mixing the ligation mixture during hybridization, or by adding volume exclusion, chaotropic agents, tetramethylammonium chloride, or N,N,N, Trimethylglycine (Betaine monohydrate). When an array consists of dozens to hundreds of addresses, it is important that the correct ligation products have an opportunity to hybridize to the appropriate address. This may be achieved by the thermal motion of oligonucleotides at the high temperatures used, by mechanical movement of the fluid in contact with the array surface, or by moving the oligonucleotides across the array by electric fields. After hybridization, the array is washed with buffer to remove unhybridized probe and optimize detection of captured probe. Alternatively, the array is washed sequentially. The specificity of hybridization may be promoted by the addition of non-specific competitor DNA (e.g. herring sperm DNA) and/or the addition of formamide to the hybridization solution. The stringency of washing may also be augmented by elevating the washing temperature and/or adding formamide to the wash buffer. FIG. 16 shows the results of various combinations of the above alterations to standard hybridization and washing conditions.

[0119] Preferably, the solid support has a porous surface of a hydrophilic polymer composed of combinations of acrylamide with functional monomers containing carboxylate, aldehyde, or amino groups. This surface is formed by coating the support with a polyacrylamide based gel. Suitable formulations include mixtures of acrylamide/acrylic acid and N,N-dimethylacrylamide/glycerol monomethacrylate. A crosslinker, N,N′-methylenebisacryl-amide, is present at a level less than 50:1, preferably less than 500:1.

[0120] One embodiment of masking negative charges during the contacting of the solid support with the ligation mixture is achieved by using a divalent cation. The divalent cation can be Mg²⁺, Ca²⁺, MN²⁺, or Co²⁺. Typically, masking with the divalent cation is carried out by pre-hydridizing the solid support with hybridization buffer containing the cation at a minimum concentration of 10 mM for a period of 15 minutes at room temperature.

[0121] Another embodiment of masking negative charges during the contacting of the solid support with the ligation mixtures is achieved by carrying out the contacting at a pH at or below 6.0. This is effected by adding a buffer to the ligation mixtures before or during contact of it with the solid support. Suitable buffers include 2-(N-morpholino)ethanesulfonic acid (MES), sodium phosphate, and potassium phosphate.

[0122] Another embodiment of masking negative charges during the contacting of the solid support with the ligation mixture is achieved by capping free carboxylic acid groups with a neutralizing agent while preserving the hydrophillicity of the polymer. Suitable neutralizing agents include ethanolamine diethanolamine, propanolamine, dipropanolamine, isopropanolamine, and diisopropanolamine. Typically, masking with neutralizing agents is carried out by activating the carboxylic acid groups within the solid support with 1-[3-dimethylamino)propyl]-3-ethylcarbodiimide hydrochloride and N-hydroxysuccinimide followed by treatment with a solution of the neutralizing agent in a polar aprotic solvent such as chloroform, dichloromethane, or tetrahydrfuran.

[0123] By masking the negative charges in accordance with the present invention, an enhanced ability to detect the presence of ligated product in the presence of unligated oligonucleotide probes is achieved. In particular, the present invention is effective to detect the presence of ligated product in a ratio to unligated oligonucleotide probes of less than 1:300, preferably less than 1:900, more preferably less than 1:3000, and most preferably less than 1:9000.

[0124] In addition, by masking the negative charges in accordance with the present invention, an enhanced ability to detect the presence of a target nucleotide sequence from a non-target nucleotide sequence where the target nucleotide sequence differs from a non-target nucleotide sequence by a single base difference is achieved. In particular, the present invention is effective to detect target nucleotide sequence in a ratio of the target nucleotide sequence to non-target nucleotide sequence of less than 1:20, preferably less than 1:50, more preferably less than 1:100, most preferably less than 1:200.

[0125] It is important to select capture oligonucleotides and addressable nucleotide sequences which will hybridize in a stable fashion. This requires that the oligonucleotide sets and the capture oligonucleotides be configured so that the oligonucleotide sets hybridize to the target nucleotide sequences at a temperature less than that which the capture oligonucleotides hybridize to the addressable array-specific portions. Unless the oligonucleotides are designed in this fashion, false positive signals may result due to capture of adjacent unreacted oligonucleotides from the same oligonucleotide set which are hybridized to the target.

[0126] The detection phase of the process involves scanning and identifying if ligation of particular oligonucleotide sets occurred and correlating ligation to a presence or absence of the target nucleotide sequence in the test sample. Scanning can be carried out by scanning electron microscopy, confocal microscopy, charge-coupled device, scanning tunneling electron microscopy, infrared microscopy, atomic force microscopy, electrical conductance, and fluorescent or phosphor imaging. Correlating is carried out with a computer.

[0127] Another aspect of the present invention relates to a method of forming an array of oligonucleotides on a support. This method involves providing a support having an array of positions each suitable for attachment of an oligonucleotide. A linker or support (preferably non-hydrolyzable), suitable for coupling an oligonucleotide to the support at each of the array positions, is attached to the solid support. An array of oligonucleotides on a solid support is formed by a series of cycles of activating selected array positions for attachment of multimer nucleotides and attaching multimer nucleotides at the activated array positions.

[0128] Yet another aspect of the present invention relates to an array of oligonucleotides on a support per se. The support has an array of positions each suitable for an attachment of an oligonucleotide. A linker or support (preferably non-hydrolyzable), suitable for coupling an oligonucleotide to the support, is attached to the support at each of the array positions. An array of oligonucleotides are placed on a support with at least some of the array positions being occupied by oligonucleotides having greater than sixteen nucleotides.

[0129] In the method of forming arrays, multimer oligonucleotides from different multimer oligonucleotide sets are attached at different array positions on a support. As a result, the support has an array of positions with different groups of multimer oligonucleotides attached at different positions.

[0130] The 1,000 different addresses can be unique capture oligonucleotide sequences (e.g., 24-mer) linked covalently to the target-specific sequence (e.g., approximately 20- to 25-mer) of a LDR oligonucleotide probe. A capture oligonucleotide probe sequence does not have any homology to either the target sequence or to other sequences on genomes which may be present in the sample. This oligonucleotide probe is then captured by its addressable array-specific portion, a sequence complementary to the capture oligonucleotide on the addressable support array. The concept is shown in two possible formats, for example, for detection of the p53 R248 mutation (FIGS. 17A-C).

[0131] FIGS. 17A-C show two alternative formats for oligonucleotide probe design to identify the presence of a germ line mutation in codon 248 of the p53 tumor suppressor gene. The wild type sequence codes for arginine (R248), while the cancer mutation codes for tryptophan (R248W). The bottom part of the diagram is a schematic diagram of the capture oligonucleotide. The thick horizontal line depicts the membrane or surface containing the addressable array. The thin curved lines indicate a flexible linker arm. The thicker lines indicate a capture oligonucleotide sequence, attached to the solid surface in the C to N direction. For illustrative purposes, the capture oligonucleotides are drawn vertically, making the linker arm in section B appear “stretched”. Since the arm is flexible, the capture oligonucleotide will be able to hybridize 5′ to C and 3′ to N in each case, as dictated by base pair complementarity. A similar orientation of oligonucleotide hybridization would be allowed if the oligonucleotides were attached to the membrane at the N-terminus. In this case, DNA/PNA hybridization would be in standard antiparallel 5′ to 3′ and 3′ to 5′. Other modified sugar-phosphate backbones would be used in a similar fashion. FIG. 17B shows two LDR probes that are designed to discriminate wild type and mutant p53 by containing the discriminating base C or T at the 3′ end. In the presence of the correct target DNA and Tth ligase, the discriminating probe is covalently attached to a common downstream oligonucleotide. The downstream oligonucleotide is fluorescently labeled. The discriminating oligonucleotides are distinguished by the presence of unique addressable array-specific portions, Z1 and Z2, at each of their 5′ ends. A black dot indicates that target dependent ligation has taken place. After ligation, oligonucleotide probes may be captured by their complementary addressable array-specific portions at unique addresses on the array. Both ligated and unreacted oligonucleotide probes are captured by the oligonucleotide array. Unreacted fluorescently labeled common probes and target DNA are then washed away at a high temperature (approximately 65° C. to 80° C.) and low salt. Mutant signal is distinguished by detection of fluorescent signal at the capture oligonucleotide complementary to addressable array-specific portion Z1, while wild type signal appears at the capture oligonucleotide complementary to addressable array-specific portion Z2. Heterozygosity is indicated by equal signals at the capture oligonucleotides complementary to addressable array-specific portions Z1 and Z2. The signals may be quantified using a fluorescent imager. This format uses a unique address for each allele and may be preferred for achieving very accurate detection of low levels of signal (30 to 100 attomoles of LDR product). FIG. 17C shows the discriminating signals may be quantified using a fluorescent imager. This format uses a unique address where oligonucleotide probes are distinguished by having different fluorescent groups, F1 and F2, on their 5′ end. Either oligonucleotide probe may be ligated to a common downstream oligonucleotide probe containing an addressable array-specific portion Z1 on its 3′ end. In this format, both wild type and mutant LDR products are captured at the same address on the array, and are distinguished by their different fluorescence. This format allows for a more efficient use of the array and may be preferred when trying to detect hundreds of potential germline mutations.

[0132] The support can be made from a wide variety of materials. The substrate may be biological, nonbiological, organic, inorganic, or a combination of any of these, existing as particles, strands, precipitates, gels, sheets, tubing, spheres, containers, capillaries, pads, slices, films, plates, slides, discs, membranes, etc. The substrate may have any convenient shape, such as a disc, square, circle, etc. The substrate is preferably flat but may take on a variety of alternative surface configurations. For example, the substrate may contain raised or depressed regions on which the synthesis takes place. The substrate and its surface preferably form a rigid support on which to carry out the reactions described herein. The substrate and its surface is also chosen to provide appropriate light-absorbing characteristics. For instance, the substrate may be a polymerized Langmuir Blodgett film, functionalized glass, Si, Ge, GaAs, GaP, SiO₂, SiN₄, modified silicon, or any one of a wide variety of gels or polymers such as (poly)tetrafluoroethylene, (poly)vinylidenedifluoride, polystyrene, polycarbonate, polyethylene, polypropylene, polyvinyl chloride, poly(methyl acrylate), poly(methyl methacrylate), or combinations thereof. Other substrate materials will be readily apparent to those of ordinary skill in the art upon review of this disclosure. In a preferred embodiment, the substrate is flat glass or single-crystal silicon.

[0133] According to some embodiments, the surface of the substrate is etched using well known techniques to provide for desired surface features. For example, by way of the formation of trenches, v-grooves, mesa structures, raised platforms, or the like, the synthesis regions may be more closely placed within the focus point of impinging light, be provided with reflective “mirror” structures for maximization of light collection from fluorescent sources, or the like.

[0134] Surfaces on the substrate will usually, though not always, be composed of the same material as the substrate. Thus, the surface may be composed of any of a wide variety of materials, for example, polymers, plastics, ceramics, polysaccharides, silica or silica-based materials, carbon, metals, inorganic glasses, membranes, or composites thereof. The surface is functionalized with binding members which are attached firmly to the surface of the substrate. Preferably, the surface functionalities will be reactive groups such as silanol, olefin, amino, hydroxyl, aldehyde, keto, halo, acyl halide, or carboxyl groups. In some cases, such functionalities preexist on the substrate. For example, silica based materials have silanol groups, polysaccharides have hydroxyl groups, and synthetic polymers can contain a broad range of functional groups, depending on which monomers they are produced from. Alternatively, if the substrate does not contain the desired functional groups, such groups can be coupled onto the substrate in one or more steps.

[0135] A variety of commercially-available materials, which include suitably modified glass, plastic, or carbohydrate surfaces or a variety of membranes, can be used. Depending on the material, surface functional groups (e.g., silanol, hydroxyl, carboxyl, amino) may be present from the outset (perhaps as part of the coating polymer), or will require a separate procedure (e.g., plasma amination, chromic acid oxidation, treatment with a functionalized side chain alkyltrichlorosilane) for introduction of the functional group. Hydroxyl groups become incorporated into stable carbamate (urethane) linkages by several methods. Amino functions can be acylated directly, whereas carboxyl groups are activated, e.g., with N,N′-carbonyldiimidazole or water-soluble carbodiimides, and reacted with an amino-functionalized compound. As shown in FIG. 18, the supports can be membranes or surfaces with a starting functional group X. Functional group transformations can be carried out in a variety of ways (as needed) to provide group X* which represents one partner in the covalent linkage with group Y*. FIG. 18 shows specifically the grafting of PEG (i.e. polyethylene glycol), but the same repertoire of reactions can be used (however needed) to attach carbohydrates (with hydroxyl), linkers (with carboxyl), and/or oligonucleotides that have been extended by suitable functional groups (amino or carboxyl). In some cases, group X* or Y* is pre-activated (isolatable species from a separate reaction); alternatively, activation occurs in situ. Referring to PEG as drawn in FIG. 18, Y and Y* can be the same (homobifunctional) or different (heterobifunctional); in the latter case, Y can be protected for further control of the chemistry. Unreacted amino groups will be blocked by acetylation or succinylation, to ensure a neutral or negatively charged environment that “repels” excess unhybridized DNA. Loading levels can be determined by standard analytical methods. Fields, et al., “Principles and Practice of Solid-Phase Peptide Synthesis,” Synthetic Peptides: A User's Guide, G. Grant, Editor, W.H. Freeman and Co.: New York. p. 77-183 (1992), which is hereby incorporated by reference.

[0136] One approach to applying functional groups on a silica-based support surface is to silanize with a molecule either having the desired functional group (e.g., olefin, amino, hydroxyl, aldehyde, keto, halo, acyl halide, or carboxyl) or a molecule A able to be coupled to another molecule B containing the desired functional group. In the former case, functionalizing of glass- or silica-based supports with, for example, an amino group is carried out by reacting with an amine compound such as 3-aminopropyl triethoxysilane, 3-aminopropylmethyldiethoxysilane, 3-aminopropyl dimethylethoxysilane, 3-aminopropyl trimethoxysilane, N-(2-aminoethyl)-3-aminopropylmethyl dimethoxysilane, N-(2-aminoethyl-3-aminopropyl) trimethoxysilane, aminophenyl trimethoxysilane, 4-aminobutyldimethyl methoxysilane, 4-aminobutyl triethoxysilane, aminoethylaminomethyphenethyl trimethoxysilane, or mixtures thereof. In the latter case, molecule A preferably contains olefinic groups, such as vinyl, acrylate, methacrylate, or allyl, while molecule B contains olefinic groups and the desired functional groups. In this case, molecules A and B are polymerized together. In some cases, it is desirable to modify the silanized surface to modify its properties (e.g., to impart biocompatibility and to increase mechanical stability). This can be achieved by addition of olefinic molecule C along with molecule B to produce a polymer network containing molecules A, B, and C.

[0137] Molecule A is defined by the following formula: [chemical structure]
[0138] R¹ is H or CH₃
[0139] R² is (C═O)—O—R⁶, aliphatic group with or without functional substituent(s), an aromatic group with or without functional substituent(s), or mixed aliphatic/aromatic groups with or without functional substituent(s);
[0140] R³ is an O-alkyl, alkyl, or halogen group;
[0141] R⁴ is an O-alkyl, alkyl, or halogen group;
[0142] R⁵ is an O-alkyl, alkyl, or halogen group; and

[0143] R⁶ is an aliphatic group with or without functional substituent(s), an aromatic group with or without functional substituent(s), or mixed aliphatic/aromatic groups with or without functional substituent(s). Examples of Molecule A include 3-(trimethoxysilyl)propyl methacrylate, N-[3-(trimethoxysilyl)propyl]-N′-(4-vinylbenzyl)ethylenediamine, triethoxyvinylsilane, triethylvinylsilane, vinyltrichlorosilane, vinyltrimethoxysilane, and vinylytrimethylsilane.

[0144] Molecule B can be any monomer containing one or more of the functional groups described above. Molecule B is defined by the following formula: [chemical structure]
[0145] (i) R¹ is H or CH₃,
   [0146] R² is (C═O), and
   [0147] R³ is OH or Cl. or
[0148] (ii) R¹ is H or CH₃ and
   [0149] R² is (C═O)—O—R⁴, an aliphatic group with or without functional substituent(s), an aromatic group with or without functional substituent(s), and mixed aliphatic/aromatic groups with or without functional substituent(s); and
   [0150] R³ is a functional group, such as OH, COOH, NH₂, halogen, SH, COCl, or active ester; and
   [0151] R⁴ is an aliphatic group with or without functional substituent(s), an aromatic group with or without functional substituent(s), or mixed aliphatic/aromatic groups with or without functional substituent(s). Examples of molecule B include acrylic acid, acrylamide, methacrylic acid, vinylacetic acid, 4-vinylbenzoic acid, itaconic acid, allyl amine, allylethylamine, 4-aminostyrene, 2-aminoethyl methacrylate, acryloyl chloride, methacryloyl chloride, chlorostyrene, dichlorostyrene, 4-hydroxystyrene, hydroxymethyl styrene, vinylbenzyl alcohol, allyl alcohol, 2-hydroxyethyl methacrylate, or poly(ethylene glycol) methacrylate.

[0152] Molecule C can be any molecule capable of polymerizing to molecule A, molecule B, or both and may optionally contain one or more of the functional groups described above. Molecule C can be any monomer or cross-linker, such as acrylic acid, methacrylic acid, vinylacetic acid, 4-vinylbenzoic acid, itaconic acid, allyl amine, allylethylamine, 4-aminostyrene, 2-aminoethyl methacrylate, acryloyl chloride, methacryloyl chloride, chlorostyrene, dichlorostyrene, 4-hydroxystyrene, hydroxymethyl styrene, vinylbenzyl alcohol, allyl alcohol, 2-hydroxyethyl methacrylate, poly(ethylene glycol) methacrylate, methyl acrylate, methyl methacrylate, ethyl acrylate, ethyl methacrylate, styrene, 1-vinylimidazole, 2-vinylpyridine, 4-vinylpyridine, divinylbenzene, ethylene glycol dimethacryarylate, N,N′-methylenediacrylamide, N,N′-phenylenediacrylamide, 3,5-bis(acryloylamido)benzoic acid, pentaerythritol triacrylate, trimethylolpropane trimethacrylate, pentaerythritol tetraacrylate, trimethylolpropane ethoxylate (14/3 EO/OH) triacrylate, trimethyolpropane ethoxylate (7/3 EO/OH) triacrylate, triethylolpropane propoxylate (1 PO/OH) triacrylate, or trimethyolpropane propoxylate (2 PO/PH triacrylate).

[0153] Generally, the functional groups serve as staring points for oligonucleotides that will ultimately be coupled to the support. These functional groups can be reactive with an organic group that is to be attached to the support or it can be modified to be reactive with that group, as through the use of linkers or handles. The functional groups can also impart various desired properties to the support.

[0154] After functionalization (if necessary) of the support, tailor-made polymer networks containing activated functional groups that may serve as carrier sites for complementary oligonucleotide capture probes can be grafted to the support. The advantage of this approach is that the loading capacity of capture probes can thus be increased significantly, while physical properties of the intermediate solid-to-liquid phase can be controlled better. Parameters that are subject to optimization include the type and concentration of functional group-containing monomers, as well as the type and relative concentration of the crosslinkers that are used.

[0155] The surface of the functionalized substrate is preferably provided with a layer of linker molecules, although it will be understood that the linker molecules are not required elements of the invention. The linker molecules are preferably of sufficient length to permit polymers in a completed substrate to interact freely with molecules exposed to the substrate. The linker molecules should be 6-50 atoms long to provide sufficient exposure. The linker molecules may be, for example, aryl acetylene, ethylene glycol oligomers containing 2-10 monomer units, diamines, diacids, amino acids, or combinations thereof.

[0156] According to alternative embodiments, the linker molecules are selected based upon their hydrophilic/hydrophobic properties to improve presentation of synthesized polymers to certain receptors. For example, in the case of a hydrophilic receptor, hydrophilic linker molecules will be preferred to permit the receptor to approach more closely the synthesized polymer.

[0157] According to another alternative embodiment, linker molecules are also provided with a photocleavable group at any intermediate position. The photocleavable group is preferably cleavable at a wavelength different from the protective group. This enables removal of the various polymers following completion of the syntheses by way of exposure to the different wavelengths of light.

[0158] The linker molecules can be attached to the substrate via carbon-carbon bonds using, for example, (poly)tri-fluorochloroethylene surfaces or, preferably, by siloxane bonds (using, for example, glass or silicon oxide surfaces). Siloxane bonds with the surface of the substrate may be formed in one embodiment via reactions of linker molecules bearing trichlorosilyl groups. The linker molecules may optionally be attached in an ordered array, i.e., as parts of the head groups in a polymerized monolayer. In alternative embodiments, the linker molecules are adsorbed to the surface of the substrate.

[0159] As an example of assembling arrays with multimers, such assembly can be achieved with tetramers. Of the 256 (44) possible ways in which four bases can be arranged as tetramers, 36 that have unique sequences can be selected. Each of the chosen tetramers differs from all the others by at least two bases, and no two dimers are complementary to each other. Furthermore, tetramers that would result in self-pairing or hairpin formation of the addresses have been el inated.

[0160] The final tetramers are listed in Table 1 and have been numbered arbitrarily from 1 to 36. This unique set of tetramers are used as design modules for the sometimes desired 24-mer capture oligonucleotide address sequences. The structures can be assembled by stepwise (one base at a time) or convergent (tetramer building blocks) synthetic strategies. Many other sets of tetramers may be designed which follow the above rules. The segment approach is not uniquely limited to tetramers, and other units, i.e. dimers, trimers, pentamers, or hexamers could also be used.

TABLE 1

List of tetramer PNA sequences and complemen-
tary DNA sequences, which differ from each
other by at least 2 bases.

| | | | |
|---|---|---|---|
| Number | Sequence (N-C) | Complement (5′-3′) | G + C |

| | | | |
|---|---|---|---|
| 1. | TCTG | CAGA | 2 |
| 2. | TGTC | GACA | 2 |
| 3. | TCCC | GGGA | 3 |
| 4. | TGCG | CGCA | 3 |
| 5. | TCGT | ACGA | 2 |
| 6. | TTGA | TCAA | 1 |
| 7. | TGAT | ATCA | 1 |
| 8. | TTAG | CTAA | 1 |
| 9. | CTTG | CAAG | 2 |
| 10. | CGTT | AACG | 2 |
| 11. | CTCA | TGAG | 2 |
| 12. | CACG | CGTG | 3 |
| 13. | CTGT | ACAG | 2 |
| 14. | CAGC | GCTG | 3 |
| 15. | CCAT | ATGG | 2 |
| 16. | CGAA | TTCG | 2 |
| 17. | GCTT | AAGC | 2 |
| 18. | GGTA | TACC | 2 |
| 19. | GTCT | AGAC | 2 |
| 20. | GACC | GGTC | 3 |
| 21. | GAGT | ACTC | 2 |
| 22. | GTGC | GCAC | 3 |
| 23. | GCAA | TTGC | 2 |
| 24. | GGAC | GTCC | 3 |
| 25. | AGTG | CACT | 2 |
| 26. | AATC | GATT | 1 |
| 27. | ACCT | AGGT | 2 |
| 28. | ATCG | CGAT | 2 |
| 29. | ACGG | CCGT | 3 |
| 30. | AGGA | TCCT | 2 |
| 31. | ATAC | GTAT | 1 |
| 32. | AAAG | CTTT | 1 |
| 33. | CCTA | TAGG | 2 |
| 34. | GATG | CATC | 2 |
| 35. | AGCC | GGCT | 3 |
| 36. | TACA | TGTA | 1 |

Note that the numbering scheme for tetramers permits abbreviation of each address as a string of six numbers (e.g., second column of Table 2 infra). The concept of a 24-mer address designed from a unique set of 36 tetramers (Table 1) allows a huge number of possible structures, 36⁶=2,176,782,336.

[0161] FIG. 19 shows one of the many possible designs of 36 tetramers which differ from each other by at least 2 bases. The checkerboard pattern shows all 256 possible tetramers. A given square represents the first two bases on the left followed by the two bases on the top of the checkerboard. Each tetramer must differ from each other by at least two bases, and should be non-complementary. The tetramers are shown in the white boxes, while their complements are listed as (number)'. Thus, the complementary sequences GACC (20) and GGTC (20′) are mutually exclusive in this scheme. In addition, tetramers must be non-palindromic, e.g., TCGA (darker diagonal line boxes), and non-repetitive, e.g., CACA (darker diagonal line boxes from upper left to lower right). All other sequences which differ from the 36 tetramers by only 1 base are shaded in light gray. Four potential tetramers (white box) were not chosen as they are either all A•T or G•C bases. However, as shown below, the Tₘ values of A•T bases can be raised to almost the level of G•C bases. Thus, all A•T or G•C base tetramers (including the ones in white boxes) could potentially be used in a tetramer design. In addition, thymine can be replaced by 5-propynyl uridine when used within capture oligonucleotide address sequences as well as in the oligonucleotide probe addressable array-specific portions. This would increase the Tₘ of an A•T base pair by 1.7° C. Thus, Tₘ values of individual tetramers should be approximately 15.1° C. to 15.7° C. Tₘ values for the full length 24-mers should be 95° C. or higher.

[0162] To illustrate the concept, a subset of six of the 36 tetramer sequences were used to construct arrays: 1=TGCG; 2=ATCG; 3=CAGC; 4=GGTA; 5=GACC; and 6=ACCT. This unique set of tetramers can be used as design modules for the required 24-mer addressable array-specific portion and 24-mer complementary capture oligonucleotide address sequences. This embodiment involves synthesis of five addressable array-specific portion (sequences listed in Table 2). Note that the numbering scheme for tetramers allows abbreviation of each portion (referred to as “Zip #”) as a string of six numbers (referred to as “zip code”).

TABLE 2

List of all 5 DNA/PNA oligonucleotide address
sequences.

| | | Sequence | |
|---|---|---|---|
| Zip # | Zip code | (5′ → 3′ or NH₂ → COOH) | G + C |
| Zip11 | 1-4-3-6-6-1 | TGCG-GGTA-CAGC-ACCT- | 15 |
| | | ACCT-TGCG | |
| Zip12 | 2-4-4-6-1-1 | ATCG-GGTA-GGTA-ACCT- | 14 |
| | | TGCG-TGCG | |
| Zip13 | 3-4-5-6-2-1 | CAGC-GGTA-GACC-ACCT- | 15 |
| | | ATCG-TGCG | |
| Zip14 | 4-4-6-6-3-1 | GGTA-GGTA-ACCT-ACCT- | 14 |
| | | CAGC-TGCG | |
| Zip15 | 5-4-1-6-4-1 | GACC-GGTA-TGCG-ACCT- | 15 |
| | | GGTA-TGCG | |

Each of these oligomers contains a hexaethylene oxide linker arm on their 5′ termini [P. Grossman, et al., Nucl. Acids Res., 22: 4527-4534 (1994), which is hereby incorporated by reference], and ultimate amino-functions suitable for attachment onto the surfaces of glass slides, or alternative materials. Conjugation methods will depend on the free surface functional groups [Y. Zhang, et al., Nucleic Acids Res., 19: 3929-3933 (1991) and Z. Guo, et al., Nucleic Acids Res., 34: 5456-5465 (1994), which are hereby incorporated by reference].

[0163] Synthetic oligonucleotides (normal and complementary directions, either for capture hybridization or hybridization/ligation) are prepared as either DNA or PNA, with either natural bases or nucleotide analogues. Such analogues pair with perfect complementarity to the natural bases but increase Tₘ values (e.g., 5-propynyl-uracil).

[0164] In accordance with the present invention, false hybridization signals from DNA synthesis errors are avoided. Addresses can be designed so there are very large differences in hybridization Tₘ values to incorrect address. In contrast, the direct hybridization approaches depend on subtle differences. The present invention also eliminates problems of false data interpretation with gel electrophoresis or capillary electrophoresis resulting from either DNA synthesis errors, band broadening, or false band migration.

[0165] The use of a capture oligonucleotide to detect the presence of ligation products, eliminates the need to detect single-base differences in oligonucleotides using differential hybridization. Other existing methods in the prior art relying on allele-specific PCR, differential hybridization, or sequencing-by-hybridization methods must have hybridization conditions optimized individually for each new sequence being analyzed. When attempting to detect multiple mutations simultaneously, it becomes difficult or impossible to optimize hybridization conditions. In contrast, the present invention is a general method for high specificity detection of correct signal, independent of the target sequence, and under uniform hybridization conditions. The present invention yields a flexible method for discriminating between different oligonucleotide sequences with significantly greater fidelity than by any methods currently available within the prior art.

[0166] The array of the present invention will be universal, making it useful for detection of cancer mutations, inherited (germline) mutations, and infectious diseases. Further benefit is obtained from being able to reuse the array, lowering the cost per sample.

[0167] The present invention also affords great flexibility in the synthesis of oligonucleotides and their attachment to supports. Oligonucleotides can be synthesized off of the support and then attached to unique surfaces on the support. Segments of multimers of oligonucleotides, which do not require intermediate backbone protection (e.g., PNA), can be synthesized and linked onto to the solid support. Added benefit is achieved by being able to integrate these synthetic approaches with design of the capture oligonucleotide addresses. Such production of solid supports is amenable to automated manufacture, obviating the need for human intervention and resulting contamination concerns.

[0168] An important advantage of the array of the present invention is the ability to reuse it with the previously attached capture oligonucleotides. In order to prepare the solid support for such reuse, the captured oligonucleotides must be removed without removing the linking components connecting the captured oligonucleotides to the solid support. A variety of procedures can be used to achieve this objective. For example, the solid support can be treated in distilled water at 95-100° C., subjected to 0.01 N NaOH at room temperature, contacted with 50% dimethylformamide at 90-95° C., or treated with 50% formamide at 90-95° C. Generally, this procedure can be used to remove captured oligonucleotides in about 5 minutes. These conditions are suitable for disrupting DNA-DNA hybridizations; DNA-PNA hybridizations require other disrupting conditions.

[0169] The present invention is illustrated, but not limited, by the following examples.

### EXAMPLES

### Example 1

### Materials and Methods

[0170] Oligonucleotide Synthesis and Purification. Oligonucleotides were obtained as custom synthesis products from IDT, Inc. (Coralville, Iowa), or synthesized in-house on an ABI 394 DNA Synthesizer (PE Biosystems Inc.; Foster City, Calif.) using standard phosphoramidite chemistry. Spacer phosphoramidite 18, 3′-amino-modifer C3 CPG, and 3′-fluorescein CPG were purchased from Glen Research (Sterling, Va.). All other reagents were purchased from PE Biosystems. Both labeled and unlabeled oligonucleotides were purified by electrophoresis on 12% denaturing polyacrylamide gels. Bands were visualized by UV shadowing, excised from the gel, and eluted overnight in 0.5 M NaCl, 5 mM EDTA, pH 8.0 at 37° C. Oligonucleotide solutions were desalted on C18 Sep-Paks (Waters Corporation; Milford, Mass.) according to the manufacturer's instructions, following which the oligonucleotides were concentrated to dryness (Speed-Vac) and stored at −20° C.

[0171] Cleaning of Microscope slides. Glass microscope slides (VWR, precleaned, 3 in.×.1 in.×1.2 mm) were incubated in boiling conc. NH₄OH −30% H₂O₂—H₂O (1:1:5, v/v/v) for 10 min and rinsed in distilled water. A second incubation was performed in boiling conc. HCl −30% H₂O₂—H₂O for 10 min. See U. Jönsson, et al., “Absorption Behavior of Fibronetin on Well Characterized Silica Surfaces,” J. Colloid Interface Sci. 90: 148-163 (1982), which is hereby incorporated by reference. The slides were rinsed thoroughly in distilled water, methanol, and acetone, and were air-dried at room temp.

[0172] Polymer Coated Slides. Immediately following cleaning, slides (Fisher Scientific, precleaned, 3 in.×1 in.×1.2 mm) were immersed in 2% methacryloxypropyltrimethoxysilane, 0.2% triethylamine in CHCl₃ for 30 min at 25° C., and then washed with CHCl₃ (2×15 min). A monomer solution [20 μL: 8% acrylamide, 2% acrylic acid, 0.02% N,N′-methylene-bisacrylamide (500:1 ratio of monomers:crosslinker), 0.8% ammonium persulfate radical polymerization initiator] was deposited on one end of the slides and spread out with the aid of a cover slip (24×50 mm) that had been previously silanized [5% (CH₃)₂SiCl₂ in CHCl₃]. Polymerization was achieved by heating the slides on a 70° C. hot plate for 4.5 min. Upon removal of the slides from the hot plate, the cover slips were immediately peeled off with aid of a single-edge razor blade. The coated slides were rinsed with deionized water, allowed to dry in an open atmosphere, and stored under ambient conditions.

[0173] Preparation of Zip-Code Arrays. Polymer-coated slides were pre-activated by immersing them for 30 min at 25° C. in a solution of 0.1 M 1-[3-(dimethylamino)propyl]-3-ethylcarbodiimide hydrochloride plus 20 mM N-hydroxysuccinimide in 0.1 M K₂HPO₄/KH₂PO₄, pH 6.0. The activated slides were rinsed with water, and then dried in a 65° C. oven; they were stable upon storage for 6 months or longer at 25° C. in a desiccator over Drierite.

[0174] Arrays were spotted on a Cartesian Technologies Pixsys 5500 robot at 25° C. and 70% relative humidity using 500 μM zip-code oligonucleotide solutions in 0.2 M K₂HPO₄/KH₂PO₄, pH 8.3. Each address was spotted in quadruplicate. Additionally, Cy3, Cy5, and fluorescein fiducials were printed along the top and down the right hand side of each array. Following spotting, uncoupled oligonucleotides were removed from the polymer surfaces by soaking the slides in 300 mM bicine, pH 8.0, 300 mM NaCl, 0.1% SDS, for 30 min at 65° C., rinsing with water, and drying. The arrays were stored at 25° C. in slide boxes until needed.

[0175] PCR Amplification of K-ras DNA Samples. PCR amplifications were carried out under paraffin oil in 50 μL reaction mixtures containing 10 mM Tris.HCl, pH 8.3, 4 mM MgCl₂, 50 mM KCl, 800 μM dNTPs, 1 μM forward and reverse primers (50 pmol of each primer; K-rasEx1forward and K-rasEx1reverse (Table 3)), 1 U AmpliTaq Gold, and 100 ng of genomic DNA extracted from paraffin-embedded tumors or from cell lines. Reactions were preincubated for 10 min at 95° C. Amplification was achieved by thermally cycling for 40 rounds of 94° C. for 30 sec; 60° C. for 1 min; and 72° C. for 1 min, followed by a final elongation at 72° C. for 5 min. Following PCR, 1 μL of Proteinase K (18 mg/mL) was added, and reactions were heated to 70° C. for 10 min and then quenched at 95° C. for 15 min. Two μl L of each PCR product was analyzed on a 3% agarose gel to verify the presence of amplification product of the expected size.

[0176] LDR of K-ras DNA samples. LDR was carried out under paraffin oil in 20 μL volumes containing 20 mM Tris.HCl, pH 8.5-5 mM MgCl₂-100 mM KCl, 10 mM DTT, 1 mM NAD⁺, 10 pmol total LDR probes [500 fmol each of fluorescently-labeled discriminating probes (K-rasc32Wt, labeled with Cy3, Cy5, and fluorescein; K-rasc12.2D labeled with Cy3; K-rasc12.2A labeled with Cy5; K-rasc12.2V labeled with fluorescein; K-rasc12.1S labeled with Cy3; K-rasc12.1R, labeled with Cy5; K-rasc12.1C, labeled with fluorescein; and K-rasc13.4D labeled with Cy3)+5 pmol total common probes; (1500 fmol each of K-rascd32Com9cZip1, K-rascd12Com2cZip2, and K-rascd12ComlcZip3, and 500 fmol of K-rascd13Com4cZip4) (Table 3)], and 2 μL PCR products from the cell line or tumor samples. The reaction mixtures were pre-heated for 2 min at 94° C., and then 25 fmol of wild-type Tth DNA ligase was added. The LDR reaction mixtures were cycled for 20 rounds of 94° C. for 30 sec and 65° C. for 4 min.

[0177] Hybridization of K-ras LDR Products to DNA Arrays. The LDR reaction mixtures were diluted with 20 μL of 2× hybridization buffer to produce a final buffer concentration of 300 mM MES, pH 6.0, 10 mM MgCl₂, 0.1% SDS, denatured at 94° C. for 3 min, and chilled on ice. Arrays were pre-incubated for 15 min at 25° C. in 1× hybridization buffer. Coverwells (Grace, Inc; Sunriver, Oreg.) were attached to the arrays and filled with 30 μL of the diluted LDR reaction mixtures. The arrays were placed in humidified culture tubes and incubated for 1 h at 65° C. and 20 rpm in a rotating hybridization oven. Following hybridization, the arrays were washed in 300 mM bicine, pH 8.0, 10 mM MgCl₂, 0.1% SDS for 10 min at 25° C. Fluorescent signals were measured using a Scanarray 5000 (GSI Lumonics).

[0178] LDR detection of 7 specific mutations in K-ras on an addressable universal microarray is shown in FIG. 36. The three signals along the top and those down the right hand side of each array are fiducials used for alignment. The next 4 addresses across in the second row correspond to addresses #1, #2, #3, and #4, complements of cZip1, cZip2, cZip3, and cZip4, respectively. The eight cell line (i.e. COLO205, LS180, SW1116, SW480, and DLD1) and tumor samples (G12S, G12R, and G12C) correctly identified the mutations present. Wild-type cell line COLO205 gave Cy3, Cy5, and fluorescein signal at address #1. The wild-type signal at address #1 was used as a control for all experiments. The LS180 cell line containing the Asp12 mutation gave a Cy3 signal at address #2. The SW1116 cell line containing the Ala12 mutation gave a Cy5 signal at address #2. The SW480 cell line containing the Val12 mutation gave a fluorescein signal at address #2. The G12S tumor sample containing the Ser12 mutation gave a Cy3 signal at address #3. The G12R tumor sample containing the Arg12 mutation gave a Cy5 signal at address #3. The G12C tumor sample containing the Cys12 mutation gave a fluorescein signal at address #3. The DLD1 cell line containing the Asp13 mutation gave a Cy3 signal at address #4. The incorrect signals seen at Zip4 in the LS180 and SW1116 samples were due to contamination of the samples.

TABLE 3

Primers designed for mutation detection in K-ras by
PCR/LDR/Array Hybridiztion.

| | |
|---|---|
| Primer | Sequence (5′→3′) |

| | |
|---|---|
| K-rasEx1forward | AAC CTT ATG TGT GAC ATG TTC TAA TAT AGT CAC |
| K-rasEx1reverse | AAA ATG GTC AGA GAA ACC TTT ATC TGT ATC |
| K-rascd32Com9cZip1 | PTATGATCCAACAATAGAGGTAAATCTTGTCGCAGATTT |
| | TGCGCTGGATTTCAA |
| K-rasc32Wt | Cy3-ATTCAGAATCATTTTGTGGACGAA |
| | Cy5-ATTCAGAATCATTTTGTGGACGAA |
| | Fam-ATTCAGAATCATTTTGTGGACGAA |
| K-rascd12Com2cZip2 | PTGGCGTAGGCAAGAGTGCCTTTCGCCGTCGTGTAGGCT |
| | TTTCAA |
| K-rasc12.2D | Cy3-AAACTTGTGGTAGTTGGAGCTGA |
| K-rasc12.2A | Cy5-AAACTTGTGGTAGTTGGAGCTGC |
| K-rasc12.2V | Fam-AAACTTGTGGTAGTTGGAGCTGT |
| K-rascd12Com1cZip3 | PGTGGCGTAGGCAAGAGTGCCCCGTAAGCCCGTATGGC |
| | AGATCAA |
| K-rasc12.1S | Cy3-ATATAAACTTGTGGTAGTTGGAGCTA |
| K-rasc12.1R | Cy5-ATATAAACTTGTGGTAGTTGGAGCTC |
| K-rasc12.1C | Fam-ATATAAACTTGTGGTAGTTGGAGCTT |
| K-rascd13Com4cZip4 | PCGTAGGCAAGAGTGCCTTGACATGGCCGTGCTGGGGA |
| | CA |
| | AGTCAA |
| K-rasc13.4D | Cy3-TGTGGTAGTTGGAGCTGGTGA |

Amplification was achieved by thermal cycling for 40 rounds of 94° C. for 15 sec and 60° C. for 2 min, followed by a final elongation step at 65° C. for 5 mm. Following PCR, 1 μL of Proteinase K (18 mg/mL) was added, and reactions were heated to 70° C. for 10 min and then quenched at 95° C. for 15 min. One μL of each PCR product was analyzed on a 3% agarose gel to verify the presence of amplification product of the expected size.

[0179] LDR of K-ras DNA samples. LDR reactions were carried out under paraffin oil in 20 μL volumes containing 20 mM Tris.HCl, pH 8.5, 5 mM MgCl₂, 100 mM KCl, 10 mM DTT, 1 mM NAD⁺, 8 pmol total LDR probes (500 fmol each of discriminating probes+4 pmol fluorescently-labeled common probes), and 1 pmol PCR products from cell line or tumor samples. Two probe mixes were prepared, each containing the seven mutation-specific probes, the three common probes, and either the wild-type discriminating probe for codon 12 or that for codon 13 (Table 3).

[0180] The reaction mixtures were pre-heated for 2 min at 94° C., and then 25 fmol of wild-type Tth DNA ligase was added. The LDR reactions were cycled for 20 rounds of 94° C. for 15 sec and 65° C. for 4 min. An aliquot of 2 μL of each reaction was mixed with 2 L of gel loading buffer [8% blue dextran, 50 mM EDTA, pH 8.0—formamide (1:5)], denatured at 94° C. for 2 min, and chilled on ice. One μL of each mixture was loaded on a 10% denaturing polyacrylamide gel and electrophoresed on an ABI 377 DNA sequencer at 1500 volts.

[0181] Hybridization of K-ras LDR Products to DNA Arrays. The LDR reactions (17 μL) were diluted with 40 μL of 1.4× hybridization buffer to produce a final buffer concentration of 300 mM MES, pH 6.0, 10 mM MgCl₂, 0.1% SDS. Arrays were pre-incubated for 15 min at 25° C. in 1× hybridization buffer. Coverwells (Grace, Inc; Sunriver, Oreg.) were filled with the diluted LDR reactions and attached to the arrays. The arrays were placed in humidified culture tubes and incubated for 1 h at 65° C. and 20 rpm in a rotating hybridization oven. Following hybridization, the arrays were washed in 300 mM bicine, pH 8.0, 10 mM MgCl₂, 0.1% SDS for 10 min at 25° C. Fluorescent signals were measured using a microscope/CCD, as described in the following paragraph.

[0182] Image Analysis. Arrays were imaged using a Molecular Dynamics FluorImager 595 (Sunnyvale, Calif.) or an Olympus AX70 epifluorescence microscope (Melville, N.Y.) equipped with a Princeton Instruments TE/CCD-512 TKBM1 camera (Trenton, N.J.). For analysis of fluorescein-labeled probes on the FluorImager, the 488 nm excitation was used with a 530/30 emission filter. The spatial resolution of scans was 100 μm per pixel. The resulting images were analyzed using ImageQuaNT software provided with the instrument. The epifluorescence microscope was equipped with a 100 W mercury lamp, a FITC filter cube (excitation 480/40, dichroic beam splitter 505, emission 535/50), a Texas Red filter cube (excitation 560/55, dichroic beam splitter 595, emission 645/75), and a 100 mm macro objective. The macro objective allows illumination of an object field up to 15 mm in diameter and projects a 7×7 mm area of the array onto the 12.3×12.3 mm matrix of the CCD. Images were collected in 16-bit mode using the Winview32 software provided with the camera Analysis was performed using Scion Image (Scion Corporation, Frederick, Md.).

### Example 2

### Amplification of BRCA1 and BRCA2 Exons for PCR/PCR/LDR Detection of Wild-Type and Mutant Alleles

[0183] A multiplex assay was used to detect small insertions and deletions using a modified PCR to evenly amplify each amplicon (PCR/PCR) (Belgrader et al., “A Multiplex PCR-Ligase Detection Reaction Assay for Human Identity Testing,” Genome Science and Technology 1: 77-87 (1996), which is hereby incorporated by reference) followed by ligase detection reaction (“LDR”) (Khanna, M. et al., “Multiplex PCR/LDR for Detection of K-ras Mutations in Primary Colon Tumors,” Oncogene 18: 27-38 (1999), which is hereby incorporated by reference). FIG. 20 shows how multiplex amplification of the relevant exons is carried out to ensure equal amplification of all products: a limited number of PCR cycles was performed using gene-specific primers, with further rounds of amplification primed from the universal sequences located at the extreme 5′-ends of the PCR primers. This approach minimizes amplification bias due to primer-specific effects. LDR was next used to detect both wild-type and mutant versions of the queried sequence. The ligation oligonucleotides probes hybridize to both wild-type and mutant products, but ligate only when both probes are perfectly matched with no gaps or overlaps. Products can be either eletrophoretically separated or hybridized to a microarray for identification.

[0184] PCR was carried out as a single-tube, multiplex reaction in order to simultaneously amplify BRCA1 exons 2 and 20 and BRCA2 exon 11. Genomic DNA was extracted from blood samples of Ashkenazi Jewish individuals and amplified in a 25 μl reaction mixture containing 100 ng of DNA, 400 μM of each dNTP, 1×PCR Buffer II (10 mM Tris-HCl pH 8.3 at 25° C., 50 mM KCl) supplemented with 4 mM MgCl₂, 1 U AmpliTaq Gold and 2 pmol of each gene-specific primer bearing either universal primer A or B on the 5′ ends. Table 4 shows the primers and probes for detection of BRCA1 and BRCA2 mutations using PCR/LDR/array hybridization as follows:

TABLE 4

Primers and Probes designed for mutation de-
tection in BRCA1 and BRCA2 by PCR/LDR/Array
Hybridization.

| | |
|---|---|
| Primer | Sequence (5′->3′) |

| | |
|---|---|
| PCR primers: | |
| Universal pri- | 5′ ggagcacgctatcccgttagac 3′ |
| mer A (Uni A) | |
| Universal pri- | 5′ cgctgccaactaccgcacatg 3′ |
| mer B (Uni B) | |
| BRCA1 exon 2 | 5′ Uni A- |
| forward | TCATTGGAACAGAAAGAAATGGATTTATC 3′ |
| BRCA1 exon 2 | 5′ Uni B- |
| reverse | TCTTCCCTAGTATGTAAGGTCAATTCTGTTC 3′ |
| BRCA1 exon 20 | 5′ Uni A- |
| forward | ACTTCCATTGAAGGAAGCTTCTCTTTC 3′ |
| BRCA1 exon 20 | 5′ Uni B- |
| reverse | ATCTCTGCAAAGGGGAGTGGAATAC 3′ |
| BRCA2 exon 11 | 5′ Uni A- |
| forward | CAAAATATGTCTGGATTGGAGAAAGTTTC 3′ |
| BRCA2 exon 11 | 5′ Uni B- |
| reverse | TTGGAAAAGACTTGCTTGGTACTATCTTC 3′ |
| LDR Gel-Based | |
| Assay: | |
| Discriminating | |
| Oligonucleotide | |
| Probes: | |
| BRCA1 ex 2 wild- | 5′ Fam- |
| type position | aaCATTAATGCTATGCAGAAAATCTTAGAG 3′ |
| 185 | |
| BRCA1 ex 2 posi- | 5′ Tet- |
| tion 185 del AG | GTCATTAATGCTATGCAGAAAATCTTAG 3′ |
| mutation | |
| BRCA1 ex 20 | 5′ Fam- |
| wild-type posi- | CCAAAGCGAGCAAGAGAATCC 3′ |
| tion 5382 | |
| BRCA1 ex 20 po- | 5′ Tet- |
| sition 5382 ins | aaCAAAGCGAGCAAGAGAATCCC 3′ |
| C mutation | |
| BRCA2 ex 11 | TTTAGCACAGCAAGT 3′ |
| wild-type posi- | |
| tion 6174 | |
| BRCA2 ex 11 po- | 5′ Tet- |
| sition 6174 del | |
| T mutation | TACTTGTGGGATTTTTAGCACAGCAAG 3′ |
| LDR Common | |
| Oligonucleotide | |
| Probes: | |
| BRCA1 ex 2 | 5′ P- |
| position 185 | TGTCCCATCTGGTAAGTCAGCACAAAC-B 3′ |
| BRCA1 ex 20 | 5′ P- |
| position 5382 | CAGGACAGAAAGGTAAAGCTCCCTC-B 3′ |
| BRCA2 ex 11 | 5′ P- |
| position 6174 | GGAAAATCTGTCCAGGTATCAGAT-B 3′ |
| LDR Microarray | |
| Assay: | |
| Discriminating | |
| Oligonucleotide | |
| Probes: | |
| BRCA1 ex 2 | 5′ Cy3- |
| control | TGCATAGGAGATAATCATAGGAATCC 3′ |
| BRCA1 ex 2 posi- | 5′ Cy3- |
| ion 185 del AG | GTCATTAATGCTATGCAGAAAATCTTAG 3′ |
| mutation | |
| BRCA1 ex 20 | 5′ Cy3- |
| control | CCTCTGACTTCAAAATCATGCTG 3′ |
| BRCA1 ex 20 po- | 5′ Cy3- |
| sition 5382 ins | CAAAGCGAGCAAGAGAATCCC 3′ |
| C mutation | |
| BRCA2 ex 11 | 5′ Cy3- |
| control | CTTCCCTATACTACATTTACATATATCTGAAG |
| | 3′ |
| BRCA2 ex 11 po- | 5′ Cys- |
| sition 6174 del | TCTTGTGGGATTTTTAGCACAGCAAG 3′ |
| T mutation | |
| Common Oligonu- | |
| cleotide Probes | |
| for Controls: | |
| BRCA1 exon 2 | ′P- |
| control + cZip 1 | CAAATTAATACACTCTTGTGCTGACTTACCA- |
| | cgcagattttgcgctggatttcaa-B 3′ |
| BRCA1 exon 20 | 5′ P- |
| control + cZip 2 | AAAGAAACCAAACACAACCCATCAG- |
| | ttcgccgtcgtgtaggcttttcaa-B 3′ |
| BRCA2 exon 11 | 5′ P- |
| control + cZip 3 | TTTCCAAACTAACATCACAAGGTGATATTT- |
| | ccgtaagcccgtatggcagatcaa-B 3′ |
| Common Oligonu- | |
| cleotide Probes | |
| for Mutations: | |
| BRCA1 exon 2 | 5′ P- |
| position 185 + | TGTCCCATCTGGTAAGTCAGCACAAAC- |
| cZip 9 | catcgtccctttcgatgggatcaa-B 3′ |
| BRCA1 exon 20 | 5′ P- |
| position 5382 + | CAGGACAGAAAGGTAAAGCTCCCTC- |
| cZip 10 | caaggcacgtcccagacgcatcaa-B 3′ |
| BRCA2 exon 11 | 5′ P- |
| position 6174 + | GGAAAATCTGTCCAGGTATCAGAT- |
| cZip 11 | gcacgggagctgacgacgtgtcaa-B 3′ |

The reaction was overlaid with mineral oil and preincubated for 10 min at 95° C. Amplification was performed for 15 cycles as follows: 94° C. for 15 sec, 65° C. for 1 min. A second 25 μl aliquot of the reaction mixture was added through the mineral oil containing 25 pmol each of universal primers A and B. Cycling was repeated using 55° C. annealing temperature. The reaction was next digested with a 2 μl solution of 1 mg/ml Proteinase K/50 mM EDTA at 55° C. for 10 min. Proteinase K was eliminated by a final incubation at 90° C. for 15 min. For LDR, oligonucleotide synthesis and purification were carried out as previously described (Khanna et al., “Multiplex PCR/LDR for Detection of K-ras Mutations in Primary Colon Tumors,” Oncogene 18: 27-38 (1999), which is hereby incorporated by reference). Tth DNA ligase was overproduced and purified as described elsewhere (Luo et al., “Identification of Essential Residues in Thermus thermophilus DNA Ligase,” Nucleic Acids Research 24: 3079-3085 (1996) and Barany et al., “Cloning, Overexpression, and Nucleotide Sequence of a Thermostable DNA Ligase Gene,” Gene 109: 1-11 (1991), which are hereby incorporated by reference). LDR was performed in a 20 μl reaction containing 500 fmol of each probe, 2 μl of amplified DNA and 20 mM Tris-HCl, pH 7.6; 10 mM MgCl₂; 100 mM KCl; 10 mM DTT; 1 mM NAD⁺. The reaction was heated to 94° C. for 1.5 min prior to adding 25 fmol of Tth DNA ligase and then subjected to 20 cycles of 15 sec at 94° C. and 4 min at 65° C. (See Table 4).

[0185] Using the three BRCA1 and BRCA2 founder mutations in the Ashkenazi Jewish population (BRCA1 185delAG; BRCA1 5382insC; BRCA2 6174delT) (Rahman et al., “The Genetics of Breast Cancer Susceptibility,” Annu. Rev. Genet. 32: 95-121 (1998), which is hereby incorporated by reference) as a model system, the assay readily detected these mutations in multiplexed reactions in over 80 DNA samples. FIG. 21A shows a representative LDR gel detecting the three BRCA mutations. By fluorescent end-labeling the discriminating upstream oligonucleotides with either FAM (for wild-type) or TET (for mutant), and by adding different length “tails” to LDR oligonucleotide probes, ligation products were easily distinguished based on label and migration on a polyacrylamide gel. Wild-type products are identified at the right side of the gel. Mutant products are identified at the top of the gel. Electrophoretic separation was performed at 1400 volts using 8 M urea-10% polyacrylamide gels and an ABI 373 DNA sequencer. Fluorescent ligation products were analyzed and quantified using the ABI Gene Scan 672 software.

[0186] The analysis was next extended to detect the mutations in pooled samples of DNA. DNAs with known mutations were diluted 1:2, 1:5, 1:10, and 1:20 with wild-type DNA prior to PCR amplification and then subjected to LDR These simulation experiments showed PCR/PCR/LDR could successfully detect the presence of all three mutations when known mutant DNA was diluted 1:20 in wild-type DNA prior to amplification. FIG. 21B shows BRCA1 and BRCA2 mutation detection on pooled samples of DNA. DNA samples with known mutations were diluted into wild-type DNA prior to amplification. Ligation products from multiplex LDR are shown for each dilution. BRCA1 del AG, BRCA1 ins C, and BRCA2 del T mean that only one mutation is present; multiplex LDR directed against only mutant sequences use 500 fmol of each LDR oligonucleotide probes. 3 mutations means that all three mutations are present; multiplex LDR directed against mutant sequences only use 500 fmol of each LDR oligonucleotide. 3 mutations+wild-type controls at 1:20 mean that all three mutations are present; multiplex LDR are directed against both mutant and wild-type sequences using 500 fmol and 25 fmol of each LDR oligonucleotide probes, respectively. The pooling experiment was repeated using 249 blinded Ashkenazi Jewish DNA samples. Tubes containing the blinded DNAs were assembled into a 9×9 gridded format and aliquots from each tube were combined across the rows and then down the columns to produce one tube of combined DNA for each row and each column. This was done to uniquely classify each sample using points of intersection on the gridded format. The pooled DNA was then subjected to amplification and LDR as described above. 248 of the 249 samples were correctly typed. The single sample that was incorrectly identified as wild-type proved to be too dilute and fell below the limits of detection when mixed with 9 other samples of higher concentration. The number of individual reactions carried out was reduced from 249 to 96 by this strategy (55 pooled samples and 41 individual samples used for confirmation).

[0187] In addition to gel-based detection, mutation identification was also accomplished by screening reaction products with a universal DNA microarray (Gerry et al., “Universal DNA Microarray Method for Multiplex Detection of Low Abundance Point Mutations,” J Mol Bio. 292: 251-262 (1999), which is hereby incorporated by reference). Microarrays were processed and spotted as previously described (Gerry et al., “Universal DNA Microarray Method for Multiplex Detection of Low Abundance Point Mutations,” J Mol Bio. 292: 251-262 (1999), which is hereby incorporated by reference) using a Pixsys5500 robot enclosed in a humidity chamber (Cartesian Technologies, Irvine, Calif.). Briefly, LDR reactions were hybridized in 32 μl containing 300 mM MES, pH 6.0, 10 mM MgCl₂, 0.1% SDS at 65° C. for 1 h in a rotating chamber. After washing in 300 mM bicine, pH 8.0, 10 mM MgCl₂, 0.1% SDS for 10 min at 25° C. The array was imaged on an Olympus Provis AX70 microscope using a 100 W mercury burner, a Texas Red filter cube, and a Princeton Instruments TEK512/CCD camera. The 16-bit greyscale images were captured using MetaMorph Imaging System (Universal Imaging Corporation, West Chester, Pa.) and rescaled to more narrowly bracket the LDR signal before conversion to 8-bit greyscale. The 8-bit images were colored using Adobe Photoshop to render the Cy3 signal red.

[0188] Preliminary microarray experiments using probes designed in the gel-based format (i.e., differentially labeled discriminating probes and identical common probes) demonstrated that wild-type and mutant versions of the three BRCA sequences were readily detected on the array (see WO 97/31256 to Barany et al., which is hereby incorporated by reference). In this version, both types of sequences were directed to the same addresses (e.g., BRCA1 185delAG and BRCA1 185 wild-type were both directed to zip-code 1). Although this format proved successful, PCR/PCR/LDR has the potential of detecting hundreds of mutations in a single-tube reaction and this design does not make optimal use of the array for such large-scale mutation detection experiments. In order to establish the experimental paradigm for future studies, the addressable format was expanded by choosing a sequence in each of the amplicons to use as a control an LDR ligation product. Thus, rather than require detection of wild-type sequences for each mutant LDR product, this format uses a single product to serve as a positive control for multiple different sequence variants within an amplicon (see FIG. 22). One advantage of this format is that it minimizes oligonucleotide synthesis; additionally, the use of each of the 64 positions is maximized. Since the number of LDR ligation products that can be detected at a single address is limited by the number of currently available spectrally separated fluorescent labels, confining the control to a specified region of the array permits one more sequence variant to be detected at each remaining address. In the experiments described below, control and mutant LDR ligation products for a queried position were directed to six separate addresses on a 64 position array.

[0189] All three frameshift mutations were detectable by hybridization to the universal array (FIG. 23). FIG. 23A shows the assignment of each control and mutant sequence to specific addresses on the array surface. Control signals are directed to the upper three addresses; mutant signals are assigned to the lower three. FIG. 23B shows signal produced by a wild-type DNA. FIGS. 23C, E, and G show representative hybridizations for individual DNA samples. FIGS. 23D, F, and H show representative hybridizations for each mutation using pooled samples of DNA from Ashkenazi individuals. The mutations are identified on the extreme right.

[0190] Only combinations of the six possible addresses were visible following hybridization and no additional signals were detected at any of the unused addresses. Thus, zip-code hybridization is very specific. Control and mutant signals were clearly present for each of the mutations derived from samples of DNA from single individuals (FIGS. 23C, E, and G). Pooled DNA used in analyzing the 249 DNA samples described above produced signals for mutations identical to those found in the gel-based assay (FIGS. 23D, F, and H). In each case, the array reproduced the result of the gel.

[0191] These results demonstrate that universal microarray analysis of PCR/PCR/LDR products permits rapid identification of small insertion and deletion mutations in the context of both clinical diagnosis and population studies.

### Example 3

### p53 Chip Hybridization and Washing Conditions

[0192] Three parameters (presence or absence of non-specific DNA competitor, temperature, and wash buffer composition) were varied in different combinations in order to determine which method would produce minimum background noise without significant loss of signal. Hybridization was performed with 100 μg/ml of sheared salmon sperm DNA (FIGS. 16B, D, J, and L), 250 μg/ml of sheared salmon sperm DNA (FIGS. 16F, H, N, and P), or no non-specific competitor DNA (FIGS. 16A, C, E, G, I, K, M, and O). Washing was performed for 10 min using four different conditions: room temperature in standard wash buffer (300 mM bicine, pH 8.0, 10 mM MgCl₂, 0.1% SDS) (FIGS. 16A, B, E, and F); room temperature in standard wash buffer supplemented with 10% formamide (FIGS. 16I, J, M, and N); 50° C. in standard wash buffer (FIGS. 16C, D, G, and H); or 50° C. in standard wash buffer supplemented with 10% formamide (FIGS. 16K, L, O, and P). The numbers on the upper right of each panel indicate the density of pixels for p53 exon 5 control (zip-code 1) for each condition. The percent of loss indicated on the right side of the figure compares the left and right panel directly adjacent to calculated percentage. Fiducials (Cy3, Cy5, and fluorescein) are spotted horizontally on the upper left and vertically on the lower right regions of the chips to give orientation. Zip-code 1 is located directly below the fiducial in the upper left area; subsequent zip-codes are spotted in numerical order in a left to right manner.

[0193] PCR was carried out as a single-tube, multiplex reaction in order to simultaneously amplify p53 exons 5 and 7. Commercially available genomic DNA from lymphocytes was amplified in a 25 μl reaction mixture containing 100 ng of DNA, 400 μM of each dNTP, 1×PCR Buffer II (10 mM Tris-HCl pH 8.3 at 25° C., 50 mM KCl) supplemented with 4 mM MgCl₂, 1 U AmpliTaq Gold and 2 pmol of each gene-specific primer bearing either universal primer A or B on the 5′ ends (see Table 5). The reaction was overlaid with mineral oil and preincubated for 10 min at 95° C. Amplification was performed for 15 cycles as follows: 94° C. for 15 sec, 65° C. for 1 min. A second 25 μl aliquot of the reaction mixture was added through the mineral oil containing 25 pmol each of universal primers A and B. Cycling was repeated using 55° C. annealing temperature. The reaction was next digested with a 2 μl solution of 1 mg/ml Proteinase K/50 mM EDTA at 55° C. for 10 min. Proteinase K was eliminated by a final incubation at 90° C. for 15 min. For LDR, oligonucleotide synthesis and purification were carried out as previously described (Khanna et al., “Multiplex PCR/LDR for Detection of K-ras Mutations in Primary Colon Tumors,” Oncogene 18: 27-38 (1999), which is hereby incorporated by reference). Tth DNA ligase was overproduced and purified as described elsewhere (Luo et al., “Identification of Essential Residues in Thermus thermophilus DNA Ligase,” Nucleic Acids Research 24: 3079-3085 (1996) and Barany et al., “Cloning, Overexpression, and Nucleotide Sequence of a Thermostable DNA Ligase Gene,” Gene 109: 1-11 (1991), which are hereby incorporated by reference). LDR was performed in a 20 μl reaction containing 500 fmol of each probe, 2 μl of amplified DNA and 20 mM Tris-HCl, pH 7.6; 10 mM MgCl₂; 100 mM KCl; 10 mM DTT; 1 mM NAD⁺. The reactants were heated to 94° C. for 1.5 min prior to adding 25 fmol of Tth DNA ligase and then subjected to 20 cycles of 15 sec at 94° C. and 4 min at 65° C. See Table 5 which shows the oligonucleotide primers and probes designed to detect mutations in p53 by PCR/LDR/array hybridization as follows:

TABLE 5

Primers and Probes Designed for Mutation Detection in p53 by
PCR/LDR/Array Hybridization.

| | |
|---|---|
| Primer/Probe | Sequence (5′->3′) |

| Uni A primer | GGAGCACGCTATCCCGTTAGAC |
|---|---|
| Uni B2 primer | CGCTGCCAACTACCGCACATC |
| p53X5FzipA | GGAGCACGCTATCCCGTTAGACCTGTTCACTTGTGCCCTGACTTTC |
| p53X5RzipB | CGCTGCCAACTACCGCACATCCCAGCTGCTCACCATCGCTATC |
| K132LA2G | Fam-aaaGCCAGTTGGCAAAACATCC |
| K132LA2G3 | Cy3-GCCAGTTGGCAAAACATCC |
| K132LA2GCOM | pTGTTGAGGGCAGGGGAGTACTGTAaaa-B |
| K132LA2Gzip9 | pTGTTGAGGGCAGGGGAGTACTGTA-catcgtccctttcgatgggatcaa-B |
| C135UGA | Fam-CTGCCCTCAACAAGATGTTTTA |
| C135UGA3 | Cy3-CTGCCCTCAACAAGATGTTTTA |
| C135UGCom | pCCAACTGGCCAAGACCTGCCaaaa-B |
| C135UGT | Fam-CTGCCCTCAACAAGATGTTTTT |
| C135UGT5 | Cy5-CTGCCCTCAACAAGATGTTTTT |
| C135UGzip10 | pCCAACTGGCCAAGACCTGCC-caaggcacgtcccagacgcatcaa-B |
| C141UGA | Tet-GCCAACTGGCCAAGACCTA |
| C141UGA3 | Cy3-GCCAACTGGCCAAGACCTA |
| C141UGCom | pCCCTGTGCAGCTGTGGGTTGAaaaaa-B |
| C141UGzip11 | pCCCTGTGCAGCTGTGGGTTGA-gcacgggagctgacgacgtgtcaa-B |
| V143UGA | Fam-TGGCCAAGACCTGCCCTA |
| V143UGA3 | Cy3-TGGCCAAGACCTGCCCTA |
| V143UGACOM | pTGCAGCTGTGGGTTGATTCCAaaa-B |
| V143UGAzip12 | pTGCAGCTGTGGGTTGATTCCA-agacgcaccgcaacaggctgtcaa-B |
| V143UTC | Fam-CCAAGACCTGCCCTGC |
| V143UTC3 | Cy3-CCAAGACCTGCCCTGC |
| V143UTCOM | pGCAGCTGTGGGTTGATTCCACAaaaa-B |
| V143UTzip13 | pGCAGCTGTGGGTTGATTCCACA-catcgctgcaagtaccgcactcaa-B |
| W146UG3A3 | Cy3-TGCCCTGTGCAGCTGTGA |
| W146UG3zip | pGTTGATTCCACACCCCCGCC-cgatggcttccttacccagattcg-B |
| P152LC2T2 | Tet-CGGGTGCCGGGCA |
| P152LC2T23 | Cy3-CGGGTGCCGGGCA |
| P152LC2T2COM | pGGGGTGTGGAATCAACCCACAaaaaaa-B |
| P152Lzip14 | pGGGGTGTGGAATCAACCCACA-ggctgggacgtgcagaccgttcaa-B |
| G154LG1A | Fam-atataaCACACCCCCGCCCA |
| G154LG1A3 | Cy3-CACACCCCCGCCCA |
| G154LG1ACom | pGCACCCGCGTCCGCGatataa-B |
| G154LG1Azip15 | pGCACCCGCGTCCGCG-gctggctggcacgcaccagaatca-B |
| V157LGC | Tet-GCCATGGCGCGGAG |
| V157LGC5 | Cy5-GCCATGGCGCGGAG |
| V157LGCOM | pGCGGGTGCCGGGCGaaa-B |
| V157LGT | Tet-GCCATGGCGCGGAA |
| V157LGT3 | Cy3-GCCATGGCGCGGAA |
| V157LGzip16 | pGCGGGTGCCGGGCG-ggctccgtcagaaagcgacaatca-B |
| R158LC1A5 | Cy5-GATGGCCATGGCGCT |
| R158LC1zip | pGACGCGGGTGCCGGG-acgagggatacccgcaaacgatca-B |
| R158UGA | Tet-CGGCACCCGCGTCCA |
| R158UGA3 | Cy3-CGGCACCCGCGTCCA |
| R158UGACOM | pCGCCATGGCCATCTACAAGC-B |
| R158UGAzip17 | pCGCCATGGCCATCTACAAGC-acgagggatacccgcaaacgatca-B |
| A161LC2T5 | Cy5-GTGCTGTGACTGCTTGTAGATGA |
| A161LC2Tzip | pCCATGGCGCGGACGC-gggaggctgctgtcctttcgatca-B |
| A161UGA | Tet-aaaaaaaaGCGTCCGCGCCATGA |
| A161UGA3 | Cy3-GCGTCCGCGCCATGA |
| A161UGCOM | pCCATCTACAAGCAGTCACAGCACAaaaaaaaa-B |
| A161UGzip18 | pCCATCTACAAGCAGTCACAGCACA-gggaggctgctgtcctttcgatca-B |
| V173UGA | Fam-CACAGCACATGACGGAGGTTA |
| V173UGA3 | Cy3-CACAGCACATGACGGAGGTTA |
| V173UGCOM | pTGAGGCGCTGCCCCCAaaaaa-B |
| V173UGT | Fam-CACAGCACATGACGGAGGTTT |
| V173UGT5 | Cy5-CACAGCACATGACGGAGGTTT |
| V173UGzip19 | pTGAGGCGCTGCCCCCA-acagcgtgttcgttgcttgcatca-B |
| R175LC1Com | pCCTCACAACCTCCGTCATGTGCT-B |
| R175LC1T | Fam-CATGGTGGGGGCAGCA |
| R175LC1T3 | Cy3-CATGGTGGGGGCAGCA |
| R175LC1zip20 | pCCTCACAACCTCCGTCATGTGCT-atggcgatggtccactcgcaatca-B |
| R175LG2T | Fam-CTCATGGTGGGGGCAGT |
| R175LG2T5 | Cy5-CTCATGGTGGGGGCAGT |
| R175LG2TCOM | pGCCTCACAACCTCCGTCATGTG-B |
| R175LG2Tzip21 | pGCCTCACAACCTCCGTCATGTG-gtccgtccatggcaagcgtgatca-B |
| R175UG2A | Tet-TGACGGAGGTTGTGAGGCA |
| R175UG2A3 | Cy3-TGACGGAGGTTGTGAGGCA |
| R175UG2ACom | pCTGCCCCCACCATGAGCGaaaaaa-B |
| R175UG2Azip21 | pCTGCCCCCACCATGAGCG-gtccgtccatggcaagcgtgatca-B |
| C176UGA | Fam-CGGAGGTTGTGAGGCGCTA |
| C176UGA5 | Cy5-CGGAGGTTGTGAGGCGCTA |
| C176UGCom | pCCCCCACCATGAGCGCTGaaaaaaa-B |
| C176UGT | Fam-CGGAGGTTGTGAGGCGCTT |
| C176UGT3 | Cy3-CGGAGGTTGTGAGGCGCTT |
| C176UGzip22 | pCCCCCACCATGAGCGCTG-ggctgcacccgttgaggcacatca-B |
| H179LACOM | pGGTGGGGGCAGCGCC-B |
| H179LAG | Fam-GCTATCTGAGCAGCGCTCAC |
| H179LAG3 | Cy3-GCTATCTGAGCAGCGCTCAC |
| H179LAT | Fam-GCTATCTGAGCAGCGCTCAA |
| H179LAT5 | Cy5-GCTATCTGAGCAGCGCTCAA |
| H179LAzip23 | pGGTGGGGGCAGCGCC-tcaacatcggctaacggtccatca-B |
| H179LCT | Fam-GCTATCTGAGCAGCGCTCATA |
| H179LCT3 | Cy3-GCTATCTGAGCAGCGCTCATA |
| H179LCTCOM | pGTGGGGGCAGCGCCTCAC-B |
| H179LCTzip24 | pGTGGGGGCAGCGCCTCAC-cgcacgcagtcctcctccgtatca-B |
| X5LCom | pCGGGGGTGTGGAATCAACCC-B |
| X5LWT | Fam-CGCGGGTGCCGGG |
| X5LWT3 | Cy3-CGCGGGTGCCGGG |
| X5LWT5 | Cy5-CGCGGGTGCCGGG |
| X5Lzip1 | pCGGGGGTGTGGAATCAACCC-cgcagattttgcgctggatucaa-B |
| p53X6FzipA | GGAGCACGCTATCCCGTTAGACCCTCTGATTCCTCACTGATTGCTCTTA |
| p53X6RzipB | CGCTGCCAACTACCGCACATCGGCCACTGACAACCACCCTTAAC |
| P190LCT | Tet-aaaaTCGGATAAGATGCTGAGGAGA |
| P190LCT3 | Cy3-TCGGATAAGATGCTGAGGAGA |
| P190LCTCOM | pGGCCAGACCCTAAGAGCAATCAGaaaa-B |
| P190LCTzip25 | pGGCCAGACCCTAAGAGCAATCAG-ggctcgcaggctggctcatcctaa-B |
| P190LTA5 | Cy5-CACTCGGATAAGATGCTGAGGT |
| P190LTAzip | pGGGGCCAGACCCTAAGAGCAA-ggctcgcaggctggctcatcctaa-B |
| H193LAG3 | Cy3-AATTTCCTTCCACTCGGATAAGAC |
| H193LAGzip | pGCTGAGGAGGGGCCAGACC-cgcattcgatggacaggacattcg-B |
| H193LTA5 | Cy5-AATTTCCTTCCACTCGGATAAGT |
| H193LTAzip | pTGCTGAGGAGGGGCCAGAC-cgcattcgatggacaggacattcg-B |
| R196LCCom | pGATAAGATGCTGAGGAGGGGCCA-B |
| R196LCT | Fam-CGCAAATTTCCTTCCACTCA |
| R196LCT3 | Cy3-CGCAAATTTCCTTCCACTCA |
| R196LCzip26 | pGATAAGATGCTGAGGAGGGGCCA-cgcatgaggggaaacgacgagatt-B |
| Y205LAC | Fam-AAAAGTGTTTCTGTCATCCAAAG |
| Y205LAC3 | Cy3-AAAAGTGTTTCTGTCATCCAAAG |
| Y205LACOM | pACTCCACACGCAAATTTCCTTCCAaaaaaa-B |
| Y205LAG | Fam-AAAAGTGTTTCTGTCATCCAAAC |
| Y205LAG5 | Cy5-AAAAGTGTTTCTGTCATCCAAAC |
| Y205LAzip27 | pACTCCACACGCAAATTTCCTTCCA-gcaccgtgaacgacagttgcgatt-B |
| T211LAG | Tet-CCACCACACTATGTCGAAAAGC |
| T211LAG3 | Cy3-CCACCACACTATGTCGAAAAGC |
| T211LAGCOM | pGTTTCTGTCATCCAAATACTCCACACGaaa-B |
| T211LAGzip28 | pGTTTCTGTCATCCAAATACTCCACACG-cgcaggtcgctgcgtgtcctgatt-B |
| T211LCT | Tet-ACCACCACACTATGTCGAAAAA |
| T211LCT3 | Cy3-ACCACCACACTATGTCGAAAAA |
| T211LCTCOM | pTGTTTCTGTCATCCAAATACTCCACACaaa-B |
| T211LCTzip29 | pTGTTTCTGTCATCCAAATACTCCACAC-cgcaaagcagacacagggtcgatt-B |
| R213LCCom | pAAAAGTGTTTCTGTCATCCAAATACTCCa-B |
| R213LCT | Tet-GGGCACCACCACACTATGTCA |
| R213LCT3 | Cy3-GGGCACCACCACACTATGTCA |
| R213LCzip30 | pAAAAGTGTTTCTGTCATCCAAATACTCC-catcgcacttcgctttggctgatt-B |
| Y220LACom | pAGGGCACCACCACACTATGTCGA-B |
| Y220LAG | Tet-CAGACCTCAGGCGGCTCAC |
| Y220LAG3 | Cy3-CAGACCTCAGGCGGCTCAC |
| Y220LAzip31 | pAGGGCACCACCACACTATGTCGA-ttgcgggaactcacgaggtcgtat-B |
| X6UCOM | pCCTATGAGCCGCCTGAGGTCTaaaa-B |
| X6UWT | Fam-aaaTTCGACATAGTGTGGTGGTGC |
| X6UWT3 | Cy3-TTCGACATAGTGTGGTGGTGC |
| X6UWT5 | Cy5-TTCGACATAGTGTGGTGGTGC |
| X6Uzip2 | pCCTATGAGCCGCCTGAGGTCT-ttcgccgtcgtgtaggcttttcaa-B |
| p53X7FzipA | GGAGCACGCTATCCCGTTAGACGCCTCATCTTGGGCCTGTGTTATC |
| p53X7RzipB | CGCTGCCAACTACCGCACATCGTGGATGGGTAGTAGTATGGAAGAAATC |
| Y234UTA3 | Cy3-CTCTGACTGTACCACCATCCACA |
| Y234UTAzip | pACAACTACATGTGTAACAGTTCCTGCAT-ggctacgacgcatgtaaacgttcg-B |
| M237UGA | Fam-aaaaATAAGTACCACCATCCACTACAACTACATA |
| M237UGA3 | Cy3-ATAAGTACCACCATCCACTACAACTACATA |
| M237UGCOM | pTGTAACAGTTCCTGCATGGGCGaaaa-B |
| M237UGT | Fam-aaaaATAAGTACCACCATCCACTACAACTACATT |
| M237UGT5 | Cy5-ATAAGTACCACCATCCACTACAACTACATT |
| M237UGzip32 | pTGTAACAGTTCCTGCATGGGCG-gcacggctcgataggtcaagcttt-B |
| C238UGA | Tet-CCACCATCCACTACAACTACATGTA |
| C238UGA3 | Cy3-CCACCATCCACTACAACTACATGTA |
| C238UGCom | pTAACAGTTCCTGCATGGGCGGaaaaa-B |
| C238UGzip33 | pTAACAGTTCCTGCATGGGCGG-cgatttcgactcaagcggctcttt-B |
| S241LC2A6 | Fam-ATGCCGCCCATGCAGT |
| S241LC2Azip | pAACTGTTACACATGTAGTTGTAGTGGATGGT-cgcaatggtaggtgagcaagcaga-B |
| S241LCCom | pAACTGTTACACATGTAGTTGTAGTGGATGGTaaa-B |
| S241LCG | Fam-TGCCGCCCATGCAGC |
| S241LCG5 | Cy5-TGCCGCCCATGCAGC |
| S241LCT | Fam-TGCCGCCCATGCAGA |
| S241LCT3 | Cy3-TGCCGCCCATGCAGA |
| S241LCzip34 | pAACTGTTACACATGTAGTTGTAGTGGATGGT-cgcaatggtaggtgagcaagcaga-B |
| G244UG1T | Fam-aaaaaCATGTGTAACAGTTCCTGCATGT |
| G244UG1T3 | Cy3-CATGTGTAACAGTTCCTGCATGT |
| G244UG1TCOM | pGCGGCATGAACCGGAGGCaaaaaa-B |
| G244UG1Tzip35 | pGCGGCATGAACCGGAGGC-gtccccgttacctaggcgatcaga-B |
| G244UG2A | Fam-aaaaaaTGTGTAACAGTTCCTGCATGGA |
| G244UG2A3 | Cy3-TGTGTAACAGTTCCTGCATGGA |
| G244UG2COM | pCGGCATGAACCGGAGGCCaaaaaa-B |
| G244UG2T | Fam-aaaaaaTGTGTAACAGTTCCTGCATGGT |
| G244UG2T5 | Cy5-TGTGTAACAGTTCCTGCATGGT |
| G244UG2zip36 | pCGGCATGAACCGGAGGCC-atgggtccacagtaccgctgcaga-B |
| G245UG1A | Tet-AACAGTTCCTGCATGGGCA |
| G245UG1A3 | Cy3-AACAGTTCCTGCATGGGCA |
| G245UG1ACom | pGCATGAACCGGAGGCCCAaaaa-B |
| G245UG1Azip37 | pGCATGAACCGGAGGCCCA-ccgtgggagattaggtggctcaga-B |
| G245UG2A | Fam-CAGTTCCTGCATGGGCGA |
| G245UG2A3 | Cy3-CAGTTCCTGCATGGGCGA |
| G245UG2ACom | pCATGAACCGGAGGCCCATCaaa-B |
| G245UG2Azip38 | pCATGAACCGGAGGCCCATC-gggaatggaggtgggaacgagaca-B |
| G245UG2T | Tet-aaaaaaaaAGTTCCTGCATGGGCGA |
| G245UG2T5 | Cy5-CAGTTCCTGCATGGGCGT |
| G245UG2TCOM | pCATGAACCGGAGGCCCATCaaaaaaaaa-B |
| R248LCCom | pGTTCATGCCGCCCATGCAaa-B |
| R248LCT | Tet-GGTGAGGATGGGCCTCCA |
| R248LCT3 | Cy3-GGTGAGGATGGGCCTCCA |
| R248LCzip39 | pGTTCATGCCGCCCATGCA-cgtggctgactcgctgcgatgaca-B |
| R248UGA | Tet-TGGGCGGCATGAACCA |
| R248UGA3 | Cy3-TGGGCGGCATGAACCA |
| R248UGCom | pGAGGCCCATCCTCACCATCATaa-B |
| R248UGzip40 | pGAGGCCCATCCTCACCATCAT-ttgcgcaccatcaggttagggaca-B |
| R249LACom | pCCGGTTCATGCCGCCCAa-B |
| R249LAG | Fam-TGATGGTGAGGATGGGCCC |
| R249LAG5 | Cy5-TGATGGTGAGGATGGGCCC |
| R249LAT | Fam-TGATGGTGAGGATGGGCCA |
| R249LAT3 | Cy3-TGATGGTGAGGATGGGCCA |
| R249LAzip41 | pCCGGTTCATGCCGCCCA-gcaccgatatggagaccgcagaca-B |
| R249LG3C | Tet-GATGATGGTGAGGATGGGG |
| R249LG3C3 | Cy3-GATGATGGTGAGGATGGGG |
| R249LG3Com | pCTCCGGTTCATGCCGCC-B |
| R249LG3zip42 | pCTCCGGTTCATGCCGCC-catcgacaaggtaacgcgtggaca-B |
| P250LC2T3 | Cy3-AGTGTGATGATGGTGAGGATGA |
| P250LC2Tzip | pGCCTCCGGTTCATGCCG-gtcccaagttgcggctcactttcg-B |
| I254LAG | Fam-CTGGAGTCTTCCAGTGTGATGAC |
| I254LAG3 | Cy3-CTGGAGTCTTCCAGTGTGATGAC |
| I254LAGCOM | pGGTGAGGATGGGCCTCCG-B |
| I254LAGzip43 | pGGTGAGGATGGGCCTCCG-tgagcgcaaggtcagagcacgaca-B |
| X7LCom | pCATGCAGGAACTGTTACACATGTAGTTGTAa-B |
| X7LWT | Tet-TCCGGTTCATGCCGCC |
| X7LWT3 | Cy3-TCCGGTTCATGCCGCC |
| X7LWT5 | Cy5-TCCGGTTCATGCCGCC |
| X7Lzip3 | pCATGCAGGAACTGTTACACATGTAGTTGTA-ccgtaagcccgtatggcagatcaa-B |
| p53X8FzipA | GGAGCACGCTATCCCGTTAGACGGACAGGTAGGACCTGATTTCCTTAC |
| p53X8RzipB | CGCTGCCAACTACCGCACATCCGCTTCTTGTCCTGCTTGCTTAC |
| F270UTA | Tet-aaaaaATCTACTGGGACGGAACAGCA |
| F270UTA3 | Cy3-ATCTACTGGGACGGAACAGCA |
| F270UTCOM | pTTGAGGTGCGTGTTTGTGCCTaaaaaa-B |
| F270UTzip44 | pTTTGAGGTGCGTGTTTGTGCCT-aagccgcagcacgattccgtgaca-B |
| V272UGA | Fam-aaaaaaGGACGGAACAGCTTTGAGA |
| V272UGA3 | Cy3-GGACGGAACAGCTTTGAGA |
| V272UGCOM | pTGCGTGTTTGTGCCTGTCCTGGaaaaaaa-B |
| V272UGT | Fam-aaaaaaGGACGGAACAGCTTTGAGT |
| V272UGT5 | Cy5-GGACGGAACAGCTTTGAGT |
| V272UGzip45 | pTGCGTGTTTGTGCCTGTCCTGG-tgagaagcgtccaagccagaacga-B |
| R273LCCom | pCACCTCAAAGCTGTTCCGTCCCaa-B |
| R273LCT | Tet-CCAGGACAGGCACAAACACA |
| R273LCT3 | Cy3-CCAGGACAGGCACAAACACA |
| R273LCzip46 | pCACCTCAAAGCTGTTCCGTCCC-catccaaggtccgacacgcaacga-B |
| R273UCA5 | Cy5-ACGGAACAGCTTTGAGGTGA |
| R273UCAzip | pGTGTTTGTGCCTGTCCTGGGAGA-catccaaggtccgacacgcaacga-B |
| R273UGA | Tet-CGGAACAGCTTTGAGGTGCA |
| R273UGA3 | Cy3-CGGAACAGCTTTGAGGTGCA |
| R273UGCom | pTGTTTGTGCCTGTCCTGGGAGaaaaaa-B |
| R273UGzip47 | pTGTTTGTGCCTGTCCTGGGAG-ttcgacgattcgcatcaacgcaag-B |
| C275UGA | Tet-aaaaaaaAGCTTTGAGGTGCGTGTTTA |
| C275UGA3 | Cy3-CAGCTTTGAGGTGCGTGTTTA |
| C275UGCOM | pTGCCTGTCCTGGGAGAGACCaaaaaaa-B |
| C275UGT | Tet-aaaaaaaaCAGCTTTGAGGTGCGTGTTTT |
| C275UGT5 | Cy5-CAGCTTTGAGGTGCGTGTTTT |
| G275UGzip48 | pTGCCTGTCCTGGGAGAGACC-aacggggaaggttgagcgtgacag-B |
| R280UGA | Tet-TTTGTGCCTGTCCTGGGAA |
| R280UGA3 | Cy3-TTTGTGCCTGTCCTGGGAA |
| R280UGCOM | pAGACCGGCGCACAGAGGAAGaaaaaa-B |
| R280UGT | Tet-TTTGTGCCTGTCCTGGGAT |
| R280UGT5 | Cy5-TTTGTGCCTGTCCTGGGAT |
| R280UGzip49 | pAGACCGGCGCACAGAGGAAG-cactgcacacgaaacggcacacag-B |
| D281UCA3 | Cy3-GTGCCTGTCCTGGGAGAGAA |
| D281UCAGzip | pCGGCGCACAGAGGAAGAGAA-aagcaagccaaggtatggctttgc-B |
| D281UCG5 | Cy5-GTGCCTGTCCTGGGAGAGAG |
| D281UGA3 | Cy3-TTGTGCCTGTCCTGGGAGAA |
| D281UGACzip | pACCGGCGCACAGAGGAAGAG-cgtgcgcacactcactgtccttcg-B |
| D281UGC5 | Cy5-TTGTGCCTGTCCTGGGAGAC |
| R282LCCom | pGTCTCTCCCAGGACAGGCACAAAaaa-B |
| R282LCT | Fam-TCTCTTCCTCTGTGCGCCA |
| R282LCT3 | Cy3-TCTCTTCCTCTGTGCGCCA |
| R282LCzip50 | pGTCTCTCCCAGGACAGGCACAAA-taccgacatcctgggattgcatgg-B |
| R282UG2A5 | Cy5-CCTGTCCTGGGAGAGACCA |
| R282UG2Azip | pGCGCACAGAGGAAGAGAATCTCC-taccgacatcctgggattgcatgg-B |
| E286UGA3 | Cy3-AGACCGGCGCACAGAGA |
| E286UGAzip | pAAGAGAATCTCCGCAAGAAAGGG-ttcggctgttcgtaggcaagaggt-B |
| R306LCT | Cy3-TTGTCCTGCTTGCTTACCTCA |
| R306LCT | Fam-aaaaTTGTCCTGCTTGCTTACCTCA |
| R306LCTCOM | pCTTAGTGCTCCCTGGGGGCAGaaaaa-B |
| R306LCTzip51 | pCTTAGTGCTCCCTGGGGGCAG-actccgcattgccagagctgatgg-B |
| X8UCOM | pCTCACCACGAGCTGCCCCC-B |
| X8UWT | Fam-TCCGCAAGAAAGGGGAGC |
| X8UWT3 | Cy3-TCCGCAAGAAAGGGGAGC |
| X8UWT5 | Cy5-TCCGCAAGAAAGGGGAGC |
| X8Uzip4 | pCTCACCACGAGCTGCCCCC-atggccgtgctggggacaagtcaa-B |
| The PCR primers are specifically designed to amplify regions within and surrounding the p53 gene. After 15 rounds of amplification at high Tm's (i.e. 65° C.) using the longer gene-specific primers (at 1-2 pmoles per reaction), the two universal primers (bold upper case) are added at 50 pmoles in 50 μl and products cycled for an additional 20 rounds of amplification. | |
| The allele-specific LDR probes contained fluorescent labels on the 5′-ends (Fam, Tet, Cy3 or Cy5) and the discriminating bases on their 3′-ends. Non-genomic sequence was added to the 5′-ends of some probes (designated by bold lower case) to control the final ligation product size for gel-based assays. The common LDR probes contained 5′-phosphates (p) and C-3 blocking (B) groups on their 3′-ends. Common LDR probes used in array-based detection have zipcode sequences | |
| #(designated by lower case) on their 3′-ends. | |

[0194] LDR reactions were hybridized in 32 μl containing 300 mM MES, pH 6.0, 10 mM MgCl₂, 0.1% SDS with or without 100 μg/ml sheared salmon sperm DNA at 65° C. for 1 h in a rotating chamber. After washing in 300 mM bicine, pH 8.0, 10 mM MgCl₂, 0.1% SDS with or without 10% formamide for 10 min at 25° C. or for 10 min at 50° C. The array was imaged on an Olympus Provis AX70 microscope using a 100 W mercury burner, a Texas Red filter cube, and a Princeton Instruments TEK512/CCD camera. The 16-bit greyscale images were captured using MetaMorph Imaging System (Universal Imaging Corporation) and rescaled to more narrowly bracket the LDR signal before conversion to 8-bit greyscale. The 8-bit images were inverted using Adobe Photoshop to render the Cy3 signal black.

### Example 4

### p53 Chip Hybridization Showing the Presence of Mutations in DNA from Colon Tumors

[0195] A p53 chip can detect the presence of 75 different mutations in exons 5, 6, 7 and 8 and uses 144 LDR oligonucleotides (see Table 5). FIG. 24 is an example of microarray-based p53 mutation detection using DNA derived from colon tumors. The mutation status of each sample and the zip-codes expected to capture signal are indicated to the right of each panel. The figure shows Cy3 background in the lowest panel on the right that is due to contaminating fluorescence in the spotted zip-codes (FIG. 24H). PCR was carried out as a single-tube, multiplex reaction in order to simultaneously amplify p53 exons 5, 6, 7, and 8. Genomic DNA extracted from colon tumors was amplified in a 25 μl reaction mixture containing 100 ng of DNA, 400 μM of each dNTP, 1×PCR Buffer II (10 mM Tris-HCl pH 8.3 at 25° C., 50 mM KCl) supplemented with 4 mM MgCl₂, 1 U AmpliTaq Gold and 2 pmol of each gene-specific primer bearing either universal primer A or B on the 5′ ends (see Table 5). The reaction was overlaid with mineral oil and preincubated for 10 min at 95° C. Amplification was performed for 15 cycles as follows: 94° C. for 15 sec, 65° C. for 1 min. A second 25 μl aliquot of the reaction mixture was added through the mineral oil containing 25 pmol each of universal primers A and B. Cycling was repeated using 55° C. annealing temperature. The reaction was next digested with a 2 μl solution of 1 mg/ml Proteinase K/50 mM EDTA at 55° C. for 10 min. Proteinase K was eliminated by a final incubation at 90° C. for 15 min. For LDR, oligonucleotide synthesis and purification were carried out as previously described (Khanna et al., “Multiplex PCR/LDR for Detection of K-ras Mutations in Primary Colon Tumors,” Oncogene 18: 27-38 (1999), which is hereby incorporated by reference). Tth DNA ligase was overproduced and purified as described elsewhere (Luo et al., “Identification of Essential Residues in Thermus thermophilus DNA Ligase,” Nucleic Acids Research 24: 3079-3085 (1996) and Barany et al., “Cloning, Overexpression, and Nucleotide Sequence of a Thermostable DNA Ligase Gene,” Gene 109: 1-11 (1991), which are hereby incorporated by reference). LDR was performed in a 20 μl reaction containing 500 fmol of each probe, 2 μl of amplified DNA and 20 mM Tris-HCl, pH 7.6; 10 mM MgCl₂; 100 mM KCl; 10 mM DTT; 1 mM NAD⁺. Two reactions were performed for each sample containing LDR probes that were designed to hybridize to the upper strand or lower strand of p53 sequence. The reaction was heated to 94° C. for 1.5 min prior to adding 25 fmol of Tth DNA ligase and then subjected to 20 cycles of 15 sec at 94° C. and 4 min at 65° C. (See Table 5) LDR reactions were hybridized in 32 μl containing 100 μg/ml sheared salmon sperm DNA 300 mM MES, pH 6.0, 10 mM MgCl₂, 0.1% SDS at 65° C. for 1 h in a rotating chamber. After washing in 300 mM bicine, pH 8.0, 10 mM MgCl₂, 0.1% SDS for 10 min at 50° C. The array was imaged on an Olympus Provis AX70 microscope using a 100 W mercury burner, a Texas Red filter cube, and a Princeton Instruments TEK512/CCD camera. The 16-bit greyscale images were captured using MetaMorph Imaging System (Universal Imaging Corporation) and rescaled to more narrowly bracket the LDR signal before conversion to 8-bit greyscale. Using Adobe Photoshop, the 8-bit images were first inverted to render the Cy3 signal black and then the images for each sample derived from hybridization using LDR targeted to the upper strand and lower strand of the p53 sequence were overlaid and merged. The results of this procedure are shown in FIG. 24.

### Example 5

### Optimized Zipcode Sequence Construction Using Tetramers

[0196] The universal DNA array is designed on the concept of using divergent sequences to uniquely tag LDR products such that each one is captured at a unique site. The heart of the concept is the design of 36 tetramers, each of which differs from any other by at least 2 bases (See Table 6).

TABLE 6

| | Original | | | |
|---|---|---|---|---|
| | tetramer | Tetramer | Tetramer | |
| New tetramer | designation | sequence | complement | |
| designation | (See Table 1) | 5′-3′ | 5′-3′ | G + C bases |
| 1 | 6 | TTGA | TCAA | 1 |
| 2 | 7 | TGAT | ATCA | 1 |
| 3 | 8 | TTAG | CTAA | 1 |
| 4 | 26 | AATC | GATT | 1 |
| 5 | 31 | ATAC | GTAT | 1 |
| 6 | 32 | AAAG | CTTT | 1 |
| 7 | 36 | TACA | TGTA | 1 |
| 8 | 1 | TCTG | CAGA | 2 |
| 9 | 2 | TGTC | GACA | 2 |
| 10 | 5 | TCGT | ACGA | 2 |
| 11 | 9 | CTTG | CAAG | 2 |
| 12 | 10 | CGTT | AACG | 2 |
| 13 | 11 | CTCA | TGAG | 2 |
| 14 | 13 | CTGT | ACAG | 2 |
| 15 | 15 | CCAT | ATGG | 2 |
| 16 | 16 | CGAA | TTCG | 2 |
| 17 | 17 | GCTT | AAGC | 2 |
| 18 | 18 | GGTA | TACC | 2 |
| 19 | 19 | GTCT | AGAC | 2 |
| 20 | 21 | GAGT | ACTC | 2 |
| 21 | 23 | GCAA | TTGC | 2 |
| 22 | 25 | AGTG | CACT | 2 |
| 23 | 27 | ACCT | AGGT | 2 |
| 24 | 28 | ATCG | CGAT | 2 |
| 25 | 30 | AGGA | TCCT | 2 |
| 26 | 33 | CCTA | TAGG | 2 |
| 27 | 34 | GATG | CATC | 2 |
| 28 | 3 | TCCC | GGGA | 3 |
| 29 | 4 | TGCG | CGCA | 3 |
| 30 | 12 | CACG | CGTG | 3 |
| 31 | 14 | CAGC | GCTG | 3 |
| 32 | 20 | GACC | GGTC | 3 |
| 33 | 22 | GTGC | GCAC | 3 |
| 34 | 24 | GGAC | GTCC | 3 |
| 35 | 29 | ACGG | CCGT | 3 |
| 36 | 35 | AGCC | GGCT | 3 |

By combining these 36 tetramers in sets of six, addresses that are 24 bases long can be constructed.

[0197] A 1296 array can be designed based on the concept of alternating tiling of given sets of tetramers. These capture oligonucleotides differed from their neighbors at three alternating positions, but were the same at the other three positions, i.e. (First=A, third=C, and fifth=E positions). Thus, each capture oligonucleotide differed from any other one by at least 6 out of 24 positions. Moreover, these differences were distributed across the length of the capture oligonucleotides. When aligning a correct capture oligonucleotide with an incorrect address, the Tm differences were predicted to be greater than 24° C. Nevertheless, one of the possibilities with this type of design is for three contiguous tetramers in a given set of positions (i.e. ABC) to match another capture oligonucleotide, but at a different set of positions (i.e. BCD).

[0198] Since optimal surfaces are three-dimensional porous surfaces, a given LDR product has numerous opportunity to be captured at the correct address. Even if an LDR product transiently dissociates from a given oligonucleotide within the correct address, it will rapidly find and hybridize to another oligonucleotide within the same address. In preliminary studies, it was found that changes which would be expected to alter Tm, (i.e. use of propynyl derivatives) did not markedly affect yield of correctly hybridized products. Thus, hybridization may be kinetically controlled. In order to minimize the possibility of even low levels of cross-hybridization between two closely related capture oligonucleotides, the sequences can be designed to maximize differences among the tetramer order with a 24 mer capture oligonucleotide.

[0199] The process for designing such sequences is outlined below:

[0200] 1. Create three columns containing all 46,656 (=36×36×36) permutations of three sets of the 36 tetramers.

[0201] 2. Compute the Tm of the 46,656 12-mers using the Oligo 6.0 program from Molecular Biology Insights, Inc. (Cascade, Colo.) and sort the list according to predicted Tm values.

[0202] 3. Remove 12-mers that contain one GC base (Tetramers #1-7) in each tetramer or contain three GC bases in each tetramer (Tetramers #28-36). This process removes the extremes in Tm range. Remove 12-mers with Tm values less than 24° C. Remove the remaining 12-mers that have three repeated tetramers (i.e. 9-9-9)

[0203] 4. Group the set of 12-mers by Tm with a new group for each 2 degrees increase in Tm. Values were set by dividing Tm by two and truncating to whole numbers.

[0204] 5. Randomize list and split into odd and even 12-mers. Invert second list and append to the end of first list to form 6 tetramers=12,880 address candidates. Concatenate sequences and determine Tm values of 24-mers.

[0205] 6. Select only hexa-tetramers with Tm values between 75 and 84. Reclaim unused trimers and make new hexa-tetramers with increased Tm and add back to list.

[0206] 7. The lists were pruned using the 13 selection conditions as described in Table 7: A “1” indicates a match at that position, a “0” indicates no match. Anytime two candidate addresses matched at one of the conditions, it was removed from the candidate list and returned to the unused trimer list.

TABLE 7

| Condition | Tetramer 1 | Tetramer 2 | Tetramer 3 | Tetramer 4 | Tetramer 5 | Tetramer 6 |
|---|---|---|---|---|---|---|
| L Four in a row | 1 | 1 | 1 | 1 | 0 | 0 |
| M Four in a row | 0 | 1 | 1 | 1 | 1 | 0 |
| R Four in a row | 0 | 0 | 1 | 1 | 1 | 1 |
| L Three in a row | 1 | 1 | 1 | 0 | 0 | 0 |
| M Three in a row | 0 | 1 | 1 | 1 | 0 | 0 |
| M Three in a row | 0 | 0 | 1 | 1 | 1 | 0 |
| R Three in a row | 0 | 0 | 0 | 1 | 1 | 1 |
| Interrupted 4-1 | 1 | 1 | 0 | 1 | 1 | 0 |
| Interrupted 4-2 | 1 | 1 | 0 | 0 | 1 | 1 |
| Interrupted 4-3 | 0 | 1 | 1 | 0 | 1 | 1 |
| Interrupted 4-4 | 1 | 0 | 1 | 0 | 1 | 1 |
| Interrupted 4-5 | 1 | 1 | 0 | 1 | 0 | 1 |
| Interrupted 4-6 | 1 | 0 | 1 | 1 | 0 | 1 |

[0207] 8. The above 13 selection conditions reduced the list to 9,650 address candidates.

[0208] 9. The above 13 selection conditions remove matches of four in a row and three in a row which are in the same alignment as one another; however, they do not remove sequences which are similar but shifted over by one or two tetramer units. In order to eliminate those kinds of artifacts, the sequences were copied below the original 6 tetramers, offset by a tetramer or two as in Table 8 below:

TABLE 8

| Condition | Position A | Position B | Position C | Position D | Position E | Position F |
|---|---|---|---|---|---|---|
| Four in a row + 1 | | Position A | Position B | Position C | Position D | |
| Four in a row + 2 | | | Position A | Position B | Position C | Position D |
| Four in a row − 1 | | Position C | Position D | Position E | Position F | |
| Four split − 1 | Position B | Position C | | Position E | Position F | |

[0209] 10. These three selections culled the list to 8,894 candidate capture oligonucleotides, 4,798 more than the target of 4,096 for a 64×64 address array. These capture oligonucleotide sequences have the following properties: (1) there are no cases of 4 tetramers in a row which are identical, either when capture oligonucleotide sequences are aligned with each other, or when they are offset with respect to each other or split with respect to each other; (2) there are no cases of 3 tetramers in a row which are identical, when capture oligonucleotide seqences are aligned with each other from one end; and (3) there are no cases where four out of six tetramers are in the same position.

[0210] 11. For further selection, sequences of three in a row which were offset were eliminated as in Table 9 below.

TABLE 9

| Condition | Position A | Position B | Position C | Position D | Position E | Position F |
|---|---|---|---|---|---|---|
| Three in a row + 1 | | Position A | Position B | Position C | | |
| Three in a row + 2 | | | Position A | Position B | Position C | |
| Three in a row + 3 | | | | Position A | Position B | Position C |
| Three in a row + 1 | | | Position B | Position C | Position D | |
| Three in a row + 2 | | | | Position B | Position C | Position D |
| Three in a row + 1 | | | | Position C | Position D | Position E |

[0211] 12. These six selections culled the list to 3,038 candidate capture oligonucleotides, more than a more selective target of 2,500 for a 50×50 address array. These capture oligonucleotide sequences have the following properties: (1) there are no cases of 4 tetramers in a row which are identical, either when capture oligonucleotide seqences are aligned with each other, or when they are offset with respect to each other; (2) there are no cases of 3 tetramers in a row which are identical, when capture oligonucleotides seqences are aligned with each other from one end, or when they are offset with respect to each other; and (3) there are no cases where four out of six tetramers are in the same position.

[0212] 13. The order of tetramers were reversed and new Tm values were calculated, added back in (6,076), and then pruned as described in steps 7-11 above. The candidate list increased only marginally to 3,270. Therefore, an approach which enriched the unused trimers was needed.

[0213] 14. A list of used trimers in all positions was used to determine available (unused) trimers and construct new sets of hexa-tetramers. To increase the percent of hexa-tetramers with Tm values in the 75-84° C. range, trimers with predicted Tm values of 34-50° C. were inverted with respect to each other and used (i.e. trimer ABC with Tm of 34 was fused to trimer DEF with Tm of 50, trimer ABC with Tm of 38 was fused to trimer DEF with Tm of 46, etc.).

[0214] 15. Sets of hexa-tetramers were constructed and the trimers generated at the junction (i.e. positions BCD and CDE) were retested against the used trimer list, and those hexa-tetramers which conflicted were recycled. Those hexa-tetramers which did not conflict were added to the 3,270 candidate list and resorted and pruned as described in steps 7-11. The candidate list was expanded to 4,035.

[0215] 16. The process was reiterated two more times to generate the final list of 4,633 capture oligonucleotide (FIG. 25, which refers to the tetramers in Table 6), 537 sequences more than the target of 4,096 for a 64×64 address array. These capture oligonucleotide sequences have the following properties: (1) there are no cases of 4 tetramers in a row which are identical, either when capture oligonucleotide seqences are aligned with each other, or when they are offset with respect to each other; (2) there are no cases of 3 tetramers in a row which are identical, when capture oligonucleotide seqences are aligned with each other from one end, or when they are offset with respect to each other; and (3) there are no cases where four out of six tetramers are in the same position.

[0216] 17. Using the 4,633 capture oligonucleotide list, smaller lists for an 8×8=64 address array, 8×12=96 address array, 16×24=384 address array, and 20×20=400 address array were created. As selection criteria, capture oligonucleotides which shared pairs of tetramers in common were selectively removed from the list. A culling of all dimer pairs which were the same in given positions (i.e. AB=AB) reduced the list to 465 capture oligonucleotide sequences (FIG. 26, which refers to the tetramers in Table 6). A second culling of dimer pairs similar among neighboring positions (i.e. AB=BC, BC=CD, etc.) and removal of all dimer pairs used more than twice reduced the set to 96 capture oligonucleotide sequences (FIG. 27, which refers to the tetramers in Table 6). Finally, ensuring that no dimer was used more than once generated a list of 65 capture oligonucleotide sequences (FIG. 28, which refers to the tetramers in Table 6).

[0217] 18. The capture oligonucleotides can also be in the form of PNA (i.e. Peptide Nucleotide Analogues), as shown in FIG. 29 (which refers to the tetramers in Table 6), which contains a list of 4633 such capture oligonucleotides. These PNA capture oligonucleotides are in the form of 20 mer units. PNA provides the advantage of increasing the Tm of the oligonucleotide, on average 1.0° C. to 1.5° C. per base, so the Tm values of the oligomers listed in FIG. 29 would be on average 20° C. (or more) higher when synthesized as the PNA form. Thus, the addresses would only need to be 20mers or less in the PNA form. These sequences are amenable to a more rapid synthesis by considering two alternative approaches. In the first approach, the 36 tetramers listed in Table 6 are initially synthesized, and then 5 tetramers linked in the correct order to form the sequences listed in FIG. 29. Alternatively, the PNA oligomers would be synthesized using a lithographic synthesis approach. A standard lithographic synthesis would use the 4 bases over and over again, i.e. A-C-G-T for the first position, A-C-G-T for the second position, etc., and would require 4×20=80 masks. The current sequences listed in FIG. 29 are amenable to synthesis in 62 masks, or less by altering the order of masks. The 62 masks would allow attachment of the PNA monomers in the following order:

T-G-C-A-T-G-C-A-G-T-C-A-T-G-C-A-T-G-C-A-G-T-C-A-T-
G-C-A-T-G-C-A-G-T-C-A-T-G-C-A-T-G-C-A-G-T-C-A-T-G-
C-A-T-G-C-A-G-T-C-A-T-G

[0218] For a given sequence, the mask at the next base which allows that sequence is opened over that address. By way of example, if the sequence were T-G-C-A-T-G-C-A-G-T-C-A-T-G-C-A-T-G-C-A, it could be finished using just 20 masks. Different sequences will require more masks. Thus, the 20-mers are finished with different numbers of masks. Examples are provided below for synthesis of 5 different addresses Zip ID#s 1, 2, 3, 4, and 26 which require less than 62 masks. In these examples, use of a mask is designated by an underlining of that base to achieve the correct sequence.

Zip ID#1. AATCCAGCGCAAAATCTGCG = 45 masks
T-G-C-A-T-G-C-A-G-T-C-A-T-G-C-A-T-G-C-A-G-T-C-A-T-
G-C-A-T-G-C-A-G-T-C-A-T-G-C-A-T-G-C-A-G-T-C-A-T-G-
C-A-T-G-C-A-G-T-C-A-T-G
Zip ID#2. AAAGCCTACACGACGGCGAA = 56 masks
T-G-C-A-T-G-C-A-G-T-C-A-T-G-C-A-T-G-C-A-G-T-C-A-T-
G-C-A-T-G-C-A-G-T-C-A-T-G-C-A-T-G-C-A-G-T-C-A-T-G-
C-A-T-G-C-A-G-T-C-A-T-G
Zip ID#3. TCTGCCATACGGGCTTACGG = 50 masks
T-G-C-A-T-G-C-A-G-T-C-A-T-G-C-A-T-G-C-A-G-T-C-A-T-
G-C-A-T-G-C-A-G-T-C-A-T-G-C-A-T-G-C-A-G-T-C-A-T-G-
C-A-T-G-C-A-G-T-C-A-T-G
Zip ID#4. CTTGTCCCCAGCACGGCCAT = 49 masks
T-G-C-A-T-G-C-A-G-T-C-A-T-G-C-A-T-G-C-A-G-T-C-A-T-
G-C-A-T-G-C-A-G-T-C-A-T-G-C-A-T-G-C-A-G-T-C-A-T-G-
C-A-T-G-C-A-G-T-C-A-T-G
Zip ID#26. TCGTCGTTTCCCCTCATGCG = 54 masks
T-G-C-A-T-G-C-A-G-T-C-A-T-G-C-A-T-G-C-A-G-T-C-A-T-
G-C-A-T-G-C-A-G-T-C-A-T-G-C-A-T-G-C-A-G-T-C-A-T-G-
C-A-T-G-C-A-G-T-C-A-T-G

This demonstrates that PNA addresses of 20 mers may be synthesized using a lithographic approach with no more than 62 masks, far less than the 80 masks required by the standard approach to synthesize a 20mer, and even less then the 64 masks required to make a standard PNA 16 mer.

[0219] All addresses were selected to have Tm values between 75 and 84° C. The distribution of Tm values is more or less independent of capture oligonucleotide number. While addresses with higher G+C content in general gave higher Tm values, the simple Tm=4(G+C)+2(A+T) rule was off by up to 10° C. in many cases. The values for the 96, 465, and 4633 capture oligonucleotides is shown in FIGS. 30, 31, and 32, respectively. Sorted Tm values of the 4633 list of capture oligonucleotide probes are shown in FIG. 33. The gradient of Tm values was relatively even, with the majority of capture oligonucleotides (80%) having Tm values from and including 75° C. to 80° C. FIG. 34 shows tetramer usage in the lists of 65, 96, 465, and 4633 capture oligonucleotides produced in accordance with the present invention. If tetramer distribution was completely random, each tetramer should be represented 2.7% of the time. However, selection was biased towards higher Tm capture oligonucleotide probes. Thus, tetramers which tend to increase the Tm values, i.e. #29=TGCG are over-represented, while tetramers which tend to decrease the Tm values, i.e. #7=TACA are under-represented.

[0220] The present approach to mutation detection has three orthogonal components: (i) primary PCR amplification; (ii) solution-phase LDR detection; and (iii) solid-phase hybridization capture. Therefore, background signal from each step can be minimized, and, consequently, the overall sensitivity and accuracy of the present method is significantly enhanced over those provided by other strategies. For example, “sequencing by hybridization” methods require: (i) multiple rounds of PCR or PCR/T7 transcription; (ii) processing of PCR amplified products to fragment them or render them single-stranded; and (iii) lengthy hybridization periods (10 h or more) which limit their throughput (Guo, et al., Nucleic Acids Res. 22: 5456-5465 (1994); Hacia, et. al., Nat. Genet., 14441-447 (1996); Chee, et al., Science, 274: 610-614 (1996); Cronin, et al., Human Mutation, 7: 244-255 (1996); Wang, et al., Science, 280: 1077-1082 (1998); Schena, et al., Proc. Natl. Acad. Sci. USA, 93: 10614-10619 (1996); and Shalon, et al., Genome Res., 6: 639-645 (1996), which are hereby incorporated by reference). Additionally, since the immobilized probes on these arrays have a wide range of Tₘ's, it is necessary to perform the hybridizations at temperatures from 0° C. to 44° C. The result is increased background noise and false signals due to mismatch hybridization and non-specific binding, for example on small insertions and deletions in repeat sequences (Hacia, et. al., Nat. Genet., 14441-447 (1996); Cronin, et al., Human Mutation, 7: 244-255 (1996); Wang, et al., Science 280: 1077-1082 (1998); and Southern, E. M., Trends in Genet., 12: 110-115 (1996), which are hereby incorporated by reference). In contrast, the approach of the present invention allows multiplexed PCR in a single reaction (Belgrader, et al., Genome Sci. Technol., 1: 77-87 (1996), which is hereby incorporated by reference), does not require an additional step to convert product into single-stranded form, and can readily distinguish all point mutations including slippage in repeat sequences (Day, et al., Genomics, 29: 152-162 (1995), which is hereby incorporated by reference). Alternative DNA arrays suffer from differential hybridization efficiencies due to either sequence variation or to the amount of target present in the sample. By using the present approach of designing divergent address sequences with similar thermodynamic properties, hybridizations can be carried out at 65° C., resulting in a more stringent and rapid hybridization. The decoupling of the hybridization step from the mutation detection stage offers the prospect of quantification of LDR products, as has already been achieved using gel-based LDR detection.

[0221] Arrays spotted on polymer surfaces provide substantial improvements in signal capture, as compared with arrays spotted or synthesized in situ directly on glass surfaces (Drobyshev, et al., Gene, 188: 45-52 (1997); Yershov, et al., Proc. Natl. Acad. Sci. USA, 93: 4913-4918 (1996); and Parinov, et al., Nucleic Acids Res., 24: 2998-3004 (1996), which are hereby incorporated by reference). However, the polymers described by others are limited to using 8- to 10-mer addresses while the polymeric surface of the present invention readily allows 24-mer capture oligonucleotides to penetrate and couple covalently. Moreover, LDR products of length 60 to 75 nucleotide bases are also found to penetrate and subsequently hybridize to the correct address. As additional advantages, the polymer gives little or no background fluorescence and does not exhibit non-specific binding of fluorescently-labeled oligonucleotides. Finally, capture oligonucleotides spotted and coupled covalently at a discrete address do not “bleed over” to neighboring spots, hence obviating the need to physically segregate sites, e.g., by cutting gel pads.

[0222] The present invention relates to a strategy for high-throughput mutation detection which differs substantially from other array-based detection systems presented previously in the literature. In concert with a polymerase chain reaction/ligase detection reaction (PCR/LDR) assay carried out in solution, the array of the present invention allows for accurate detection of single base mutations, whether inherited and present as 50% of the sequence for that gene, or sporadic and present at 1% or less of the wild-type sequence. This sensitivity is achieved, because thermostable DNA ligase provides the specificity of mutation discrimination, while the divergent addressable array-specific portions of the LDR probes guide each LDR product to a designated address on the DNA array. Since the address sequences remain constant and their complements can be appended to any set of LDR probes, the addressable arrays of the present invention are universal. Thus, a single array design can be programmed to detect a wide range of genetic mutations.

[0223] Robust methods for the rapid detection of mutations at numerous potential sites in multiple genes hold great promise to improve the diagnosis and treatment of cancer patients. Noninvasive tests for mutational analysis of shed cells in saliva, sputum, urine, and stool could significantly simplify and improve the surveillance of high risk populations, reduce the cost and discomfort of endoscopic testing, and lead to more effective diagnosis of cancer in its early, curable stage. Although the feasibility of detecting shed mutations has been demonstrated clearly in patients with known and genetically characterized tumors (Sidransky, et al., Science, 256: 102-105 (1992), Nollau, et al., Int. J. Cancer, 66: 332-336 (1996); Calas, et al., Cancer Res. 54: 3568-73 (1994); Hasegawa, et al., Oncogene 10: 1413-16 (1995); and Wu et al., Early Detection of Cancer Molecular Markers (Lippman, et al. ed.) (1994), which are hereby incorporated by reference), effective presymptomatic screening will require that a myriad of potential low frequency mutations be identified with minimal false-positive and false-negative signals. Furthermore, the integration of technologies for determining the genetic changes within a tumor with clinical information about the likelihood of response to therapy could radically alter how patients with more advanced tumors are selected for treatment. Identification and validation of reliable genetic markers will require that many candidate genes be tested in large scale clinical trials. While costly microfabricated chips can be manufactured with over 100,000 addresses, none of them have demonstrated a capability to detect low abundance mutations (Hacia, et. al., Nat. Genet., 14441-447 (1996); Chee, et al., Science, 274: 610-614 (1996); Kozal, et al., Nat. Med., 2: 753-759 (1996); and Wang, et al., Science, 280: 1077-1082 (1998), which are hereby incorporated by reference), as required to accurately score mutation profiles in such clinical trials. The universal addressable array approach of the present invention has the potential to allow rapid and reliable identification of low abundance mutations in multiple codons in numerous genes, as well as quantification of multiple gene deletions and amplifications associated with tumor progression. In addition, for mRNA expression profiling, the LDR-universal array can differentiate highly homologous genes, such as K-, N-, and H-ras. Moreover, as new therapies targeted to specific genes or specific mutant proteins are developed, the importance of rapid and accurate high-throughput genetic testing will undoubtedly increase.

### Example 6

### Computer Software For Designing Addressable Array to Avoid Binding to Target Sequence

[0224] In designing an addressable array, it is important to insure that the target sequence does not hybridize to capture probes on the array. As described below, a computer program has been designed for this purpose. The program locates stretches of sequence that match any of the array sequences at N-x of N adjacent nucleotide positions. The parameters x and N are set by the user.

[0225] The program sends output to the screen and to a file. The screen output summarizes the number of sequences comparisons where the longest match was i of M bases, where M is greater than or equal to N, and where i is greater than or equal to M−x. The output file shows the actual match for each sequence pair, as well as giving the summary information provided on the screen. An example of the file output is shown below.

| Input file 1: kraspoly.dos | |
|---|---|
| Input file 2: zip64.dos | |
| Minimum number of sites that must match: | 7 |
| Maximum number of mismatches allowed: | 2 |

| | |
|---|---|
| 7 out of 8 | attcagaatc (ATTTTGtG) gacgaa |
| K-rasc32Wt | |
| ZIP1 | cgcag (ATTTTGcG) ctggatttcaa |
| 7 out of 9 | attcagaatcattt (TGtGGACgA) a |
| K-rasc32Wt | |
| ZIP4 | atggccgtgc (TGgGGACaA) gtcaa |

< . . . deleted output . . . >

| | |
|---|---|
| 7 out of 8 | tgtggtagt (TGgAGCTG) gtga |
| K-rasc13.4D | |
| ZIP61 | ggctcgtg (TGtAGCTG) ccgttcct |
| 7 out of 8 | tgtggtagttg (GAGcTGGT) ga |
| K-rasc13.4D | |
| Z1P62 | ggtcaagcgct (GAGgTGGT) ccatc |

| | |
|---|---|
| SUMMARY OF ANALYSIS | |
| Comparisons with 1 mismatch | |
| 8 out of 9 bases matching: | 10 |
| 7 out of 8 bases matching: | 9 |
| Comparisons with 2 mismatches | |
| 9 out of 11 bases matching: | 2 |
| 8 out of 10 bases matching: | 27 |
| 7 out of 9 bases matching: | 36 |

A total of 84 out of 520 sequence comparisons met the match criteria.

The area within the parentheses represents the longest identified match, with upper-case alleles representing the actual matched sites and lower-case alleles representing the allowed mismatches.

[0226] The program has been written in ANSI C for the purpose of portability across platforms. The precise software used is set forth in FIG. 35. The program accepts input files in straight text format. Sequences may include standard ambiguity codes (e.g., the code Y corresponds to either C or T).

[0227] Each of F₁ sequences in Input File #1 is compared to each of F₂ sequence in File #2, for a total of F₁×F₂ comparisons. For each pair, the two sequences are compared N consecutive sites at a time in all possible alignments. If a match of at least N−x out of N adjacent sites is detected, the number of sites compared is incremented by one (i.e., after i increments, the match criteria become N−x+i out of N+i sites). This process is repeated until no matches meeting the match criteria are found. The longest match for a sequence pair is defined as the match involving the longest value of N+i, as opposed to the longest value of N−x+i. Therefore, users are explicitly should repeat all analyses with different levels of stringency (i.e., x=0, x=1, x=2, . . . ). This is important if the user is concerned with the possibility that a perfect, or near-perfect, match might be masked by a less perfect match over a longer stretch. For example, 7 out of 7 matched sites would not be reported if (i) a pair of sequences matched at 8 out of 10 sites and (ii) if the match criterion allowed 2 mismatches.

[0228] Although the invention has been described in detail for the purpose of illustration, it is understood that such details are solely for that purpose and variations can be made therein by those skilled in the art without departing from the spirit and scope of the invention which is defined by the following claims.

1. A method of designing a plurality of capture oligonucleotide probes for use on a support to which complementary oligonucleotide probes will hybridize with little mismatch, wherein the plural capture oligonucleotide probes have melting temperatures within a narrow range, said method comprising:
providing a first set of a plurality of tetramers of four nucleotides linked together, wherein (1) each tetramer within the set differs from all other tetramers in the set by at least two nucleotide bases, (2) no two tetramers within a set are complementary to one another, (3) no tetramers within a set are palindromic or dinucleotide repeats, and (4) no tetramer within a set has one or less or three or more G or C nucleotides;
linking groups of 2 to 4 of the tetramers from the first set together to form a collection of multimer units;
removing from the collection of multimer units all multimer units formed from the same tetramer and all multimer units having a melting temperature in ° C. of less than the 4 times the number of tetramers forming a multimer unit, to form a modified collection of multimer units;
arranging the modified collection of multimer units in a list in order of melting temperature;
randomizing, in 2° C. increments of melting temperature, the order of the modified collection of multimer units;
dividing alternating multimer units in the list into first and second subcollections, each arranged in order of melting temperature;
inverting the order of the second subcollection;
linking in order the first collection of multimer units to the inverted second collection of multimer units in order to form a collection of double multimer units; and
removing from the collection of double multimer units those units (1) having a melting temperature in ° C. of less than 11 times the number of tetramers and more than 15 times the number of tetramers, (2) double multimer units with the same 3 tetramers linked together, and (3) double multimer units with the same 4 tetramers linked together with or without interruption, to form a modified collection of double multimer units.

2. A method according to claim 1 further comprising:
placing the modified collection of double multimer units at positions on a support so that complementary oligonucleotides to be immobilized on the support can be captured at the positions.

3. A method according to claim 2, wherein the collection of double multimer units is shown in FIG. 26.

4. A method according to claim 2, wherein the collection of double multimer units is shown in FIG. 27.

5. A method according to claim 2, wherein the collection of double multimer units removed has a melting temperature in ° C. of less than 12.5 times the number of tetramers and more than 14 times the number of tetramers.

6. A method according to claim 1, wherein the multimer units have 12 mers, the double multimer units have 24 mers, and the melting point of the double multimer units is 75-84° C.

7. A method according to claim 1 further comprising:
reclaiming double multimer units having a melting temperature in ° C. of less than 11 times the number of tetramers and more than 15 times the number of tetramers;
unlinking the reclaimed double multimers units to each form a pair of multimer units;
selecting multimer units with a melting temperature in ° C. of more than 11 times the number of tetramers and less than 17 times the number of tetramers; and
reintegrating the selected multimer units into said method.

8. A method according to claim 7, wherein the the method of claim 7 is repeated.

9. A method according to claim 1 further comprising:
making additional different sets of a plurality of tetramers by producing, base by base, circular permutations of the tetramers within the first set and complements thereof.

10. A method according to claim 1, wherein the set of tetramers is shown in Table 1 and complements thereof.

11. A method according to claim 10, wherein the set of tetramers are one base circular permutations of the tetramers shown in Table 1 and complements thereof.

12. A method according to claim 10, wherein the set of tetramers are two base circular permutations of the tetramers shown in Table 1 and complements thereof.

13. A method according to claim 10, wherein the set of tetramers are three base circular permutations of the tetramers shown in Table 1 and complements thereof.

14. A method according to claim 1, wherein the collection of double multimer units is shown in FIG. 26.

15. A method according to claim 1, wherein the modified collection of double multimer units is shown in FIG. 27.

16. A method according to claim 1, wherein the collection of double multimer units have a melting temperature in ° C. of less than 12.5 times the number of tetramers and more than 14 times the number of tetramers.

17. An oligonucleotide array comprising:
a support and
a collection of double multimer unit oligonucleotides at different positions on the support so that complementary oligonucleotides to be immobilized on the support can be captured at the different positions, wherein the complementary oligonucleotides will hybridize, within a narrow temperature range of greater than 24° C. with little mismatch, to members of the collection of double multimer unit oligonucleotides, the double multimer unit oligonucleotides are formed from sets of tetramers where (1) each tetramer within the set differs from all other tetramers in the set by at least two nucleotide bases, (2) no two tetramers within a set are complementary to one another, and (3) no tetramers within a set are palindromic or dinucleotide repeats, and the collection of double multimer unit oligonucleotides has had the following oligonucleotides removed from it: (1) oligonucleotides having a melting temperature in ° C. less than 12.5 times the number of tetramers and more than 14 times the number of tetramers, (2) double multimer units with the same 3 tetramers linked together, and (3) multimer units with the same 4 tetramers linked together with or without interruption.

18. An oligonucleotide array according to claim 17, wherein the collection of double multimer units is shown in FIG. 26.

19. An oligonucleotide array according to claim 17, wherein the collection of double multimer units is shown in FIG. 27.

20. An oligonucleotide array according to claim 17, wherein the collection of double multimer units has a melting temperature in ° C. less than 12.5 times the number of tetramers and more than 14 times the number of tetramers.

21. An oligonucleotide array according to claim 17, wherein the double multimer units have 24 mers and the melting temperature of the double multimer units is 75-84° C.

22. An oligonucleotide array according to claim 17, wherein the set of tetramers is shown in Table 6 and complements thereof.

23. An oligonucleotide array according to claim 17, wherein the set of tetramers are one base circular permutations of the tetramers shown in Table 6 and complements thereof.

24. A oligonucleotide array according to claim 17, wherein the set of tetramers are two base circular permutations of the tetramers shown in Table 6 and complements thereof.

25. An oligonucleotide array according to claim 17, wherein the set of tetramers are three base circular permutations of the tetramers shown in Table 6 and complements thereof.

26. A method for identifying one or more of a plurality of sequences differing by one or more single-base changes, insertions, deletions, or translocations in a plurality of target nucleotide sequences comprising:
providing a sample potentially containing one or more target nucleotide sequences with a plurality of sequence differences;
providing a plurality of oligonucleotide probe sets, each set characterized by (a) a first oligonucleotide probe, having a target-specific portion and an addressable array-specific portion, and (b) a second oligonucleotide probe, having a target-specific portion and a detectable reporter label, wherein the oligonucleotide probes in a particular set are suitable for ligation together when hybridized adjacent to one another on a corresponding target nucleotide sequence, but have a mismatch which interferes with such ligation when hybridized to any other nucleotide sequence present in the sample;
providing a ligase,
blending the sample, the plurality of oligonucleotide probe sets, and the ligase to form a mixture;
subjecting the mixture to one or more ligase detection reaction cycles comprising a denaturation treatment, wherein any hybridized oligonucleotides are separated from the target nucleotide sequences, and a hybridization treatment, wherein the oligonucleotide probe sets hybridize at adjacent positions in a base-specific manner to their respective target nucleotide sequences, if present in the sample, and ligate to one another to form a ligated product sequence containing (a) the addressable array-specific portion, (b) the target-specific portions connected together, and (c) the detectable reporter label, and, wherein the oligonucleotide probe sets may hybridize to nucleotide sequences in the sample other than their respective target nucleotide sequences but do not ligate together due to a presence of one or more mismatches and individually separate during the denaturation treatment;
providing a support with different capture oligonucleotides immobilized at different positions, wherein the capture oligonucleotides have nucleotide sequences complementary to the addressable array-specific portions and are formed from a collection of double multimer unit oligonucleotides, wherein oligonucleotide with addressable array-specific portions will hybridize, within a narrow temperature range of more than 4 times the number of tetramers in the multimer unit with little mismatch, to the capture oligonuncleotides, the double multimer unit oligonucleotides are formed from sets of tetramers where (1) each tetramer within the set differs from all other tetramers in the set by at least two nucleotide bases, (2) no two tetramers within a set are complementary to one another, and (3) no tetramers within a set are palindromic or dinucleotide repeats, and the collection of double multimer unit oligonucleotides has had the following oligonucleotides removed from it: (1) oligonucleotides having a melting temperature in ° C. of 11 times the number of tetramers and more than 15 times the number of tetramers, (2) double multimer units with the same 3 tetramers linked together, and (3) double multimer units with the same 4 tetramers linked together with or without interruption, to form a modified collection of double multimer units;
contacting the mixture, after said subjecting, with the support under conditions effective to hybridize the addressable array-specific portions to the capture oligonucleotides in a base-specific manner, thereby capturing the addressable array-specific portions on the support at the site with the complementary capture oligonucleotide; and
detecting the reporter labels of ligated product sequences captured on the support at particular sites, thereby indicating the presence of one or more target nucleotide sequences in the sample.

27. A method according to claim 26, wherein the oligonucleotide probes in a set are suitable for ligation together at a ligation junction when hybridized adjacent to one another on a corresponding target nucleotide sequence due to perfect complementarity at the ligation junction, but, when the oligonucleotide probes in the set are hybridized to any other nucleotide sequence present in the sample, have a mismatch at a base at the ligation junction which interferes with such ligation.

28. A method according to claim 27, wherein the mismatch is at the 3′ base at the ligation junction.

29. A method according to claim 26, wherein the oligonucleotide probes in a set are suitable for ligation together at a ligation junction when hybridized adjacent to one another on a corresponding target nucleotide sequence due to perfect complementarity at the ligation junction, but, when the oligonucleotide probes in the set are hybridized to any other nucleotide sequence present in the sample, there is a mismatch at a base adjacent to a base at the ligation junction which interferes with such ligation.

30. A method according to claim 29, wherein the mismatch is at the base adjacent to the 3′ base at the ligation junction.

31. A method according to claim 26, wherein the sample potentially contains unknown amounts of one or more of a plurality of target sequences with a plurality of sequence differences, said method further comprising:
quantifying, after said detecting, the amount of the target nucleotide sequences in the sample by comparing the amount of captured ligated product sequences generated from the sample with a calibration curve of captured ligated product sequences generated from samples with known amounts of the target nucleotide sequence.

32. A method according to claim 26, wherein the sample potentially contains unknown amounts of one or more of a plurality of target nucleotide sequences with a plurality of sequence differences, said method further comprising:
providing a known amount of one or more marker target nucleotide sequence;
providing a plurality of marker-specific oligonucleotide probe sets, each set characterized by (a) a first oligonucleotide probe, having a target-specific portion complementary to the marker target nucleotide sequence and an addressable array-specific portion complementary to capture oligonucleotides on the support, and (b) a second oligonucleotide probe, having a target-specific portion complementary to the marker target nucleotide sequence and a detectable reporter label, wherein the oligonucleotide probes in a particular marker-specific oligonucleotide set are suitable for ligation together when hybridized adjacent to one another on a corresponding marker target nucleotide sequence, but, when hybridized to any other nucleotide sequence present in the sample or added marker sequences, there is a mismatch which interferes with such ligation, wherein said blending comprises blending the sample, the marker target nucleotide sequences, the plurality of oligonucleotide probe sets, the plurality of marker-specific oligonucleotide probe sets, and the ligase to form a mixture;
detecting the reporter labels of the ligated marker-specific oligonucleotide sets captured on the support at particular sites, thereby indicating the presence of one or more marker target nucleotide sequences in the sample; and
quantifying the amount of target nucleotide sequences in the sample by comparing the amount of captured ligated product generated from the known amount of marker target nucleotide sequences with the amount of captured other ligated product.

33. A method according to claim 31, wherein the one or more marker target nucleotide sequences differ from the target nucleotide sequences in the sample at one or more single nucleotide positions.

34. A method according to claim 33, wherein the oligonucleotide probe sets and the marker-specific oligonucleotide probe sets form a plurality of oligonucleotide probe groups, each group comprised of one or more oligonucleotide probe sets designed for distinguishing multiple allele differences at a single nucleotide position, wherein, in the oligonucleotide probe sets of each group, the first oligonucleotide probes have a common target-specific portion, and the second oligonucleotide probes have a differing target-specific portion which hybridize to a given allele or a marker nucleotide sequence in a base-specific manner.

35. A method according to claim 33, wherein the oligonucleotide probe sets and the marker-specific oligonucleotide probe sets form a plurality of oligonucleotide probe groups, each group comprised of one or more oligonucleotide probe sets designed for distinguishing multiple allele differences at a single nucleotide position, wherein, in the oligonucleotide probe sets of each group, the second oligonucleotide probes have a common target-specific portion and the first oligonucleotide probes have differing target-specific portions, which hybridize to a given allele or a marker nucleotide sequence in a base-specific manner.

36. A method according to claim 26, wherein the sample potentially contains unknown amounts of two or more of a plurality of target nucleotide sequences with a plurality of sequence differences, said method further comprising:
quantifying, after said detecting, the relative amount of each of the plurality of target nucleotide sequences in the sample by comparing the relative amount of captured ligated product sequences generated by each of the plurality of target sequences within the sample, thereby providing a quantitative measure of the relative level of two or more target nucleotide sequences in the sample.

37. A method according to claim 26, wherein the target-specific portions of the oligonucleotide probe sets have substantially the same melting temperature so that they hybridize to target nucleotide sequences under similar hybridization conditions.

38. A method according to claim 26, wherein multiple allele differences at one or more nucleotide position in a single target nucleotide sequence or multiple allele differences at one or more positions in multiple target nucleotide sequences are distinguished, the oligonucleotide probe sets forming a plurality of oligonucleotide probe groups, each group comprised of one or more oligonucleotide probe sets designed for distinguishing multiple allele differences at a single nucleotide position, wherein, in the oligonucleotide probes of each group, the second oligonucleotide probes have a common target-specific portion and the first oligonucleotide probes have differing target-specific portions which hybridize to a given allele in a base-specific manner, wherein, in said detecting, the labels of ligated product sequences of each group, captured on the support at different sites, are detected, thereby indicating a presence, in the sample of one or more allele at one or more nucleotide position in one or more target nucleotide sequences.

39. A method according to claim 38, wherein the oligonucleotide probes in a given set are suitable for ligation together at a ligation junction when hybridized adjacent to one another on a corresponding target nucleotide sequence due to perfect complementarity at the ligation junction, but, when hybridized to any other nucleotide sequence present in the sample, the first oligonucleotide probe has a mismatch at a base at the ligation junction which interferes with such ligation.

40. A method according to claim 38, wherein multiple allele differences at two or more adjacent nucleotide positions, or at nucleotide positions which require overlapping oligonucleotide probe sets, in a single target nucleotide sequence or multiple allele differences at two or more adjacent nucleotide positions, or at nucleotide positions which require overlapping oligonucleotide probe sets, in multiple target nucleotide sequences are distinguished with oligonucleotide probe groups having oligonucleotide probes with target-specific portions which overlap.

41. A method according to claim 40, wherein the oligonucleotide probes in a set are suitable for ligation together at a ligation junction when hybridized adjacent to one another on a corresponding target nucleotide sequence due to perfect complementarity at the ligation junction, but, when the oligonucleotide probes in the set are hybridized to any other nucleotide sequence present in the sample, there is a mismatch at a base at the ligation junction which interferes with such ligation.

42. A method according to claim 26, wherein multiple allele differences consisting of insertions, deletions, microsatellite repeats, translocations, or other DNA rearrangements at one or more nucleotide positions which require overlapping oligonucleotide probe sets in a single target nucleotide sequence or multiple allele differences consisting of insertions, deletions, microsatellite repeats, translocations, or other DNA rearrangements at one or more nucleotide positions which require overlapping oligonucleotide probe sets in multiple target nucleotide sequences are distinguished, the oligonucleotide probe sets forming a plurality of oligonucleotide probe groups, each group comprised of one or more oligonucleotide probe sets designed for distinguishing multiple allele differences selected from the group consisting of insertions, deletions, microsatellite repeats, translocations, and other DNA rearrangements at one or more nucleotide positions which require overlapping oligonucleotide probe sets, wherein, in the oligonucleotide probe sets of each group, the second oligonucleotide probes have a common target-specific portion and the first oligonucleotide probes have differing target-specific portions which hybridize to a given allele in a base-specific manner, wherein, in said detecting, the labels of ligated product sequences of each group, captured on the support at different sites, are detected, thereby indicating a presence, in the sample, of one or more allele differences selected from the group consisting of insertions, deletions, microsatellite repeats, translocations, and other DNA rearrangements in one or more target nucleotide sequences.

43. A method according to claim 42, wherein the oligonucleotide probe sets are designed for distinguishing multiple allele differences selected from the group consisting of insertions, deletions, and microsatellite repeats, at one or more nucleotide positions which require overlapping oligonucleotide probe sets, wherein, in the oligonucleotide probe sets of each group, the second oligonucleotide probes have a common target-specific portion, and the first oligonucleotide probes have differing target-specific portions which contain repetitive sequences of different lengths to hybridize to a given allele in a base-specific manner.

44. A method according to claim 26, wherein a low abundance of multiple allele differences at multiple adjacent nucleotide positions, or at nucleotide positions which require overlapping oligonucleotide probe sets, in a single target nucleotide sequence, in the presence of an excess of normal sequence, or a low abundance of multiple allele differences at multiple nucleotide positions which require overlapping oligonucleotide probe sets, in multiple target nucleotide sequences, in the presence of an excess of normal sequence, are distinguished, the oligonucleotide probe sets forming a plurality of oligonucleotide probe groups, each group comprised of one or more oligonucleotide probe sets designed for distinguishing multiple allele differences at a single nucleotide position, wherein one or more sets within a group share common second oligonucleotide probes and the first oligonucleotide probes have differing target-specific portions which hybridize to a given allele excluding the normal allele in a base-specific manner, wherein, in said detecting, the labels of ligated product sequences of each group captured on the support at different sites, are detected, thereby indicating a presence, in the sample, of one or more low abundance alleles at one or more nucleotide positions in one or more target nucleotide sequences.

45. A method according to claim 44, wherein the oligonucleotide probes in a set are suitable for ligation together at a ligation junction when hybridized adjacent to one another on a corresponding target nucleotide sequence due to perfect complementarity at the ligation junction, but, when the oligonucleotide probes in the set are hybridized to any other nucleotide sequence present in the sample, the first oligonucleotide probes have a mismatch at a base at the ligation junction which interferes with such ligation.

46. A method according to claim 44, wherein a low abundance of multiple allele differences at multiple adjacent nucleotide positions, or at nucleotide positions which require overlapping oligonucleotide probe sets, in a single target nucleotide sequence, in the presence of an excess of normal sequence, or a low abundance of multiple allele differences at multiple nucleotide positions which require overlapping oligonucleotide probe sets in multiple target nucleotide sequences, in the presence of an excess of normal sequence, are quantified in a sample, said method further comprising:
providing a known amount of one or more marker target nucleotide sequences;
providing a plurality of marker-specific oligonucleotide probe sets, each set characterized by (a) a first oligonucleotide probe having a target-specific portion complementary to the marker target nucleotide sequence and an addressable array-specific portion, and (b) a second oligonucleotide probe, having a target-specific portion complementary to the marker target nucleotide sequence and a detectable reporter label, wherein the oligonucleotide probes in a particular marker-specific oligonucleotide set are suitable for ligation together when hybridized adjacent to one another on a corresponding marker target nucleotide sequence, but, when hybridized to any other nucleotide sequence present in the sample or added marker sequences, have a mismatch which interferes with such ligation;
providing a plurality of oligonucleotide probe groups, each group comprised of one or more oligonucleotide probe sets or marker-specific oligonucleotide probe sets designed for distinguishing multiple allele differences at a single nucleotide position, including marker nucleotide sequences, wherein one or more sets within a group share a common second oligonucleotide probe and the first oligonucleotide probes have different target-specific probe portions which hybridize to a given allele or a marker nucleotide sequence excluding the normal allele, in a base-specific manner, wherein said blending comprises blending the sample, the marker target nucleotide sequences, the plurality of oligonucleotide probe sets, the plurality of marker-specific oligonucleotide probe sets, and the ligase to form a mixture;
detecting the reporter labels of the ligated marker-specific oligonucleotide sets captured on the support at particular sites, thereby indicating the presence of one or more marker target nucleotide sequences in the sample; and
quantifying the amount of target nucleotide sequences in the sample by comparing the amount of captured ligated products generated from the known amount of marker target nucleotide sequences with the amount of other captured ligated product generated from the low abundance unknown sample.

47. A method according to claim 46, wherein the oligonucleotide probes in a set are suitable for ligation together at a ligation junction when hybridized adjacent to one another on a corresponding target nucleotide sequence under selected conditions due to perfect complementarity at the ligation junction, but, when the oligonucleotide probes in the set are hybridized to any other nucleotide sequence present in the sample, the first oligonucleotide probes have a mismatch at a base at the ligation junction which interferes with such ligation.

48. A method according to claim 26, wherein multiple allele differences at one or more nucleotide position in a single target nucleotide sequence or multiple allele differences at one or more positions in multiple target nucleotide sequences are distinguished, the oligonucleotide sets forming a plurality of oligonucleotide probe groups, each group comprised of one or more oligonucleotide probe sets designed for distinguishing multiple allele differences at a single nucleotide position, wherein, in the oligonucleotide probes of each group, the first oligonucleotide probes have a common target-specific portion and the second oligonucleotide probes have differing target-specific portions which hybridize to a given allele in a base-specific manner, wherein, in said detecting, different reporter labels of ligated product sequences of each group captured on the support at particular sites are detected, thereby indicating a presence, in the sample, of one or more alleles at one or more nucleotide positions in one or more target nucleotide sequences.

49. A method according to claim 48, wherein the oligonucleotide probes in a set are suitable for ligation together at a ligation junction when hybridized adjacent to one another on a corresponding target nucleotide sequence due to perfect complementarity at the ligation junction, but, when the oligonucleotide probes in the set are hybridized to any other nucleotide sequence present in the sample, the second oligonucleotide probes have a mismatch at a base at the ligation junction which interferes with such ligation.

50. A method according to claim 48, wherein multiple allele differences at two or more adjacent nucleotide positions, or at nucleotide positions which require overlapping oligonucleotide probe sets, in a single target nucleotide sequence, or multiple allele differences at two or more adjacent nucleotide positions, or at nucleotide positions which require overlapping oligonucleotide probe sets, in multiple target nucleotide sequences are distinguished, the oligonucleotide probe groups containing oligonucleotide probes with target-specific portions which overlap.

51. A method according to claim 50, wherein the oligonucleotide probes in a set are suitable for ligation together at a ligation junction when hybridized adjacent to one another on a corresponding target nucleotide sequence due to perfect complementarity at the ligation junction, but, when the oligonucleotide probes in the set are hybridized to any other nucleotide sequence present in the sample, the second oligonucleotide probe has a mismatch at a base at the ligation junction which interferes with such ligation.

52. A method according to claim 26, wherein multiple allele differences at one or more nucleotide position in a single target nucleotide sequence or multiple allele differences at one or more positions in multiple target nucleotide sequences are distinguished, the oligonucleotide sets forming a plurality of probe groups, each group comprised of one or more oligonucleotide probe sets designed for distinguishing multiple allele differences at a single nucleotide position, wherein, in the oligonucleotide probes of different groups, the second oligonucleotide probes have a common target-specific portion or the first oligonucleotide probes have a common target-specific portion, wherein, in said detecting, the one of a plurality of labeled ligated product sequences of each group captured on the support at particular sites are detected, thereby indicating a presence of one or more allele at one or more nucleotide positions in one or more target nucleotide sequences in the sample.

53. A method according to claim 52, wherein the oligonucleotide probes in a given set are suitable for ligation together at a ligation junction when hybridized adjacent to one another on a corresponding target nucleotide sequence due to perfect complementarity at the ligation junction but, when the oligonucleotides in the set are hybridized to any other nucleotide sequence present in the sample, the first or second oligonucleotide probes have a mismatch at a base at the ligation junction which interferes with such ligation.

54. A method according to claim 52, wherein multiple allele differences at two or more adjacent nucleotide positions, or at nucleotide positions which require overlapping oligonucleotide probe sets, in a target nucleotide sequence or multiple allele differences at two or more adjacent nucleotide positions, or at nucleotide positions which require overlapping oligonucleotide probe sets, in multiple target nucleotide sequences, are distinguished, the oligonucleotide probe groups containing probes with target-specific portions which overlap.

55. A method according to claim 54, wherein oligonucleotide probes in a set are suitable for ligation together at a ligation junction when hybridized adjacent to one another on a corresponding target nucleotide sequence due to perfect complementarity at the ligation junction, but, when the oligonucleotides in the set are hybridized to any other nucleotide sequence present in the sample, the first or second oligonucleotide probes have a mismatch at a base at the ligation junction which interferes with such ligation.

56. A method according to claim 53, wherein all possible single-base mutations for a single codon in a single target nucleotide sequence, all possible single-base mutations for multiple codons in a single target nucleotide sequence, and all possible single-base mutations for multiple codons in multiple target nucleotide sequences are distinguished, the oligonucleotide sets forming a plurality of oligonucleotide probe groups, each group comprised of one or more oligonucleotide probe sets designed for distinguishing all possible single-base mutations for a single codon, wherein, in the oligonucleotide probes of each group, the second oligonucleotide probes differ only in their 5′ bases at their ligation junction and contain different reporter labels, the first oligonucleotide probes differ only in their 3′ bases at their ligation junction and contain different addressable array-specific portions, or the first oligonucleotide probes differ only in their 3′ bases adjacent to the base at the ligation junction and contain different addressable array-specific portions.

57. A method according to claim 53, wherein the oligonucleotide probes in a set are suitable for ligation together at a ligation junction when hybridized adjacent to one another on a corresponding target nucleotide sequence due to perfect complementarity at the ligation junction, but, when the oligonucleotides in the set are hybridized to any other nucleotide sequence present in the sample, the first oligonucleotide probes have a mismatch at the 3′ base at the ligation junction or the 3′ base adjacent the base at the ligation junction or the second oligonucleotide probes have a mismatch at the 5′ base at the ligation junction which interferes with such ligation.

58. A method according to claim 57, wherein all possible single-base mutations for a single codon in a single target nucleotide sequence, or all possible single-base mutations for two or more adjacent codons, or at nucleotide positions which require overlapping oligonucleotide probe sets, in multiple target nucleotide sequences are distinguished, the oligonucleotide probe groups containing oligonucleotide probes with target-specific portions which overlap.

59. A method according to claim 26, wherein the denaturation treatment is at a temperature of about 80°-105° C.

60. A method according to claim 26, wherein each cycle, comprising a denaturation treatment and a hybridization treatment, is from about 30 seconds to about five minutes long.

61. A method according to claim 26, wherein said subjecting is repeated for 2 to 50 cycles.

62. A method according to claim 26, wherein total time for said subjecting is 1 to 250 minutes.

63. A method according to claim 26, wherein the ligase is selected from the group consisting of Thermus aquaticus ligase, Thermus thermophilus ligase, E. coli ligase, T4 ligase, and Pyrococcus ligase.

64. A method according to claim 26, wherein the detectable reporter label is selected from the group consisting of chromophores, fluorescent moieties, enzymes, antigens, heavy metals, magnetic probes, dyes, phosphorescent groups, radioactive materials, chemiluminescent moieties, and electrochemical detecting moieties.

65. A method according to claim 26, wherein the target-specific portions of the oligonucleotide probes each have a hybridization temperature of 20-85° C.

66. A method according to claim 26, wherein the target-specific portions of the oligonucleotide probes are 20 to 28 nucleotides long.

67. A method according to claim 26, wherein the mixture further includes a carrier DNA.

68. A method according to claim 26 further comprising:
amplifying the target nucleotide sequences in the sample prior to said blending.

69. A method according to claim 68, wherein said amplifying is carried out by subjecting the sample to a polymerase-based amplifying procedure.

70. A method according to claim 68, wherein said polymerase-based amplifying procedure is carried out with DNA polymerase.

71. A method according to claim 68, when rein said polymerase-based amplifying procedure is carried out with reverse transcriptase.

72. A method according to claim 68, wherein said polymerase-based amplifying procedure is carried out with RNA polymerase.

73. A method according to claim 68, wherein said amplifying is carried out by subjecting the target nucleotide sequences in the sample to a ligase chain reaction process.

74. A method according to claim 26, wherein the oligonucleotide probe sets are selected from the group consisting of ribonucleotides, deoxyribonucleotides, modified ribonucleotides, modified deoxyribonucleotides, peptide nucleic acids, modified peptide nucleic acids, modified phosphate-sugar backbone oligonucleotides, nucleotide analogues, and mixtures thereof.

75. A method according to claim 26, wherein said method is used to detect infectious diseases caused by bacterial, viral, parasitic, and fungal infectious agents.

76. A method according to claim 75, wherein the infectious disease is caused by a bacteria selected from the group consisting of Escherichia coli Salmonella, Shigella, Klebsiella, Pseudomonas, Listeria monocytogenes, Mycobacterium tuberculosis, Mycobacterium avium-intracellulare, Yersinia, Francisella, Pasteurella, Brucella, Clostridia, Bordetella pertussis, Bacteroides, Staphylococcus aureus, Streptococcus pneumonia, B-Hemolytic strep., Corynebacteria, Legionella, Mycoplasma, Ureaplasma, Chlamydia, Neisseria gonorrhea, Neisseria meningitides, Hemophilus influenza, Enterococcus faecalis, Proteus vulgaris, Proteus mirabilis, Helicobacter pylori, Treponema palladium, Borrelia burgdorferi, Borrelia recurrentis, Rickettsial pathogens, Nocardia, and Acitnomycetes.

77. A method according to claim 75, wherein the infectious disease is caused by a fungal infectious agent selected from the group consisting of Cryptococcus neoformans, Blastomyces dermatitidis, Histoplasma capsulatum, Coccidioides immitis, Paracoccicioides brasiliensis, Candida albicans, Aspergillus fumigautus, Phycomycetes (Rhizopus), Sporothrix schenckii, Chromomycosis, and Maduromycosis.

78. A method according to claim 75, wherein the infectious disease is caused by a viral infectious agent selected from the group consisting of human immunodeficiency virus, human T-cell lymphocytotrophic virus, hepatitis viruses (e.g., Hepatitis B Virus and Hepatitis C Virus), Epstein-Barr Virus, cytomegalovirus, human papillomaviruses, orthomyxo viruses, paramyxo viruses, adenoviruses, corona viruses, rhabdo viruses, polio viruses, toga viruses, bunya viruses, arena viruses, rubella viruses, and reo viruses.

79. A method according to claim 75, wherein the infectious disease is caused by a parasitic infectious agent selected from the group consisting of Plasmodium falciparum, Plasmodium malaria, Plasmodium vivax, Plasmodium ovale, Onchoverva volvulus, Leishmania, Trypanosoma spp., Schistosoma spp., Entamoeba histolytica, Cryptosporidum, Giardia spp., Trichimonas spp., Balatidium coli, Wuchereria bancrofti, Toxoplasma spp., Enterobius vermicularis, Ascaris lumbricoides, Trichuris trichiura, Dracunculus medinesis, trematodes, Diphyllobothrium latum, Taenia spp., Pneumocystis carinii, and Necator americanis.

80. A method according to claim 26, wherein said method is used to detect genetic diseases.

81. A method according to claim 80, wherein the genetic disease is selected from the group consisting of 21 hydroxylase deficiency, cystic fibrosis, Fragile X Syndrome, Turner Syndrome, Duchenne Muscular Dystrophy, Down Syndrome, heart disease, single gene diseases, HLA typing, phenylketonuria, sickle cell anemia, Tay-Sachs Syndrome, thalassemia, Klinefelter's Syndrome, Huntington's Disease, autoimmune diseases, lipidosis, obesity defects, hemophilia, inborn errors in metabolism, and diabetes.

82. A method according to claim 26, wherein said method is used to detect cancer involving oncogenes, tumor suppressor genes, or genes involved in DNA amplification, replication, recombination, or repair.

83. A method according to claim 82, wherein the cancer is associated with a gene selected from the group consisting of BRCA1 gene, p53 gene, Familial polyposis coli, Her2/Neu amplification, Bcr/Ab1, K-ras gene, human papillomavirus Types 16 and 18, leukemia, colon cancer, breast cancer, lung cancer, prostate cancer, brain tumors, central nervous system tumors, bladder tumors, melanomas, liver cancer, osteosarcoma and other bone cancers, testicular and ovarian carcinomas, ENT tumors, and loss of heterozygosity.

84. A method according to claim 26, wherein said method is used for environmental monitoring, forensics, and food and feed industry monitoring.

85. A method according to claim 26, wherein said detecting comprises:
scanning the support at the particular sites and identifying if ligation of the oligonucleotide probe sets occurred and
correlating identified ligation to a presence or absence of the target nucleotide sequences.

86. A method according to claim 85, wherein said scanning is carried out by scanning electron microscopy, electron microscopy, confocal microscopy, charge-coupled device, scanning tunneling electron microscopy, infrared microscopy, atomic force microscopy, electrical conductance, and fluorescent or phosphor imaging.

87. A method according to claim 85, wherein said correlating is carried out with a computer.

88. A method according to claim 26, wherein said contacting the mixture with the support is at a temperature of 45-90° C. and for a time period of up to 60 minutes.

89. A method according to claim 26, wherein some of the plurality of capture oligonucleotides have identical nucleotide sequences and different labels are used for some different target nucleotide sequence.

90. A method according to claim 26, wherein the plurality of capture oligonucleotides each have different nucleotide sequences.

91. A method according to claim 89, wherein each capture oligonucleotide has adjacent capture oligonucleotides separated from adjacent capture oligonucleotides by barrier oligonucleotides to which ligated oligonucleotide probe sets will not hybridize during said contacting.

92. A method according to claim 26, wherein the oligonucleotide probe sets hybridize to the target nucleotide sequences at temperatures which are less than that at which the capture oligonucleotides hybridize to the addressable array-specific portion of oligonucleotide probe sets.

93. A method according to claim 26 further comprising:
treating the mixture chemically or enzymatically, after said subjecting the mixture to a series of ligase detection reaction cycles, to destroy unligated oligonucleotide probes.

94. A method according to claim 93, wherein said treating is carried out with an exonuclease.

95. A method according to claim 26 further comprising:
removing oligonucleotides bound to the capture oligonucleotides to permit reuse of the support with immobilized capture oligonucleotides.

96. A method according to claim 26, wherein the support includes different capture oligonucleotides immobilized at different sites with different capture oligonucleotides being complementary to different addressable array-specific portions, whereby different oligonucleotide probe sets are captured and detected at different sites on the support.

97. A method according to claim 26, wherein the support includes identical capture oligonucleotides immobilized on the support with the capture oligonucleotides being complementary to all the addressable array-specific portions and the labels attached to the oligonucleotide probe sets being different, whereby the different oligonucleotide probe sets are detected and distinguished by the different labels.

98. A method according to claim 26, wherein the collection of double multimer units is shown in FIG. 26.

99. A method according to claim 26, wherein the collection of double multimer units is shown in FIG. 27.

100. A method according to claim 26, wherein the collection of double multimer units removed has a melting temperature in ° C. of less than 12.5 times the number of tetramers and more than 14 times the number of tetramers.

101. A method according to claim 26, wherein the double multimer units have 24 mers and the melting point of the double multimer units is 75-84° C.

102. A method according to claim 26, wherein the set of tetramers is shown in Table 1 and complements thereof.

103. A method according to claim 26, wherein the set of tetramers are one base circular permutations of the tetramers shown in Table 1 and complements thereof.

104. A method according to claim 26, wherein the set of tetramers are two base circular permutations of the tetramers shown in Table 1 and complements thereof.

105. A method according to claim 26, wherein the set of tetramers are three base circular permutations of the tetramers shown in Table 1 and complements thereof.

106. A kit for identifying one or more of a plurality of sequences differing by single-base changes, insertions, deletions, or translocations in a plurality of target nucleotide sequences comprising:
a ligase;
a plurality oligonucleotide probe sets, each characterized by (a) a first oligonucleotide probe, having a target sequence-specific portion and an addressable array-specific portion, and (b) a second oligonucleotide probe, having a target sequence-specific portion and detectable reporter label, wherein the oligonucleotide probes in a particular set are suitable for ligation together when hybrided adjacent to one another on a respective target nucleotide sequence, but have a mismatch which interferes with such ligation when hybridized to any other nucleotide sequence, present in the sample; and
a support with different capture oligonucleotides immobilized at different positions, wherein the capture oligonucleotides have nucleotide sequences complementary to the addressable array-specific portions and are formed from a collection of double multimer unit oligonucleotides, wherein oligonucleotide with addressable array-specific portions will hybridize, within a narrow temperature range of greater than 4 times the number of tetramers in the multimer unit with little mismatch, to members of the capture oligonuncleotides, the double multimer unit oligonucleotides are formed from sets of tetramers where (1) each tetramer within the set differs from all other tetramers in the set by at least two nucleotide bases, (2) no two tetramers within a set are complementary to one another, and (3) no tetramers within a set are palindromic or dinucleotide repeats, and the collection of double multimer unit oligonucleotides has had the following oligonucleotides removed from it: (1) oligonucleotides having a melting temperature in ° C. of less than 11 times the number of tetramers and more than 15 times the number of tetramers, (2) double multimer units with the same 3 tetramers linked together, and (3) double multimer units with the same 4 tetramers linked together with or without interruption, wherein the capture oligonucleotides have nucleotide sequences complementary to the addressable array-specific portions.

107. A kit according to claim 106, wherein the mismatch of oligonucleotide probe sets to nucleotide sequences other than their respective target nucleotide sequences is at a base at a ligation junction at which the oligonucleotide probe of each set ligate together when hybridized to their respective target nucleotide sequences.

108. A kit according to claim 106, wherein the mismatch is on the oligonucleotide probe of the oligonucleotide probe sets which have 3′ ends at the ligation junction.

109. A kit according to claim 106, wherein the mismatch of oligonucleotide probe sets to nucleotide sequences other than their respective target nucleotide sequence is at a base adjacent to a ligation junction at which the oligonucleotide probes of each set ligate together when hybridized to their respective target nucleotide sequences.

110. A kit according to claim 109, wherein the mismatch is on the oligonucleotide probe of the oligonucleotide probe sets which have 3′ ends at the ligation junction.

111. A kit according to claim 106, wherein the ligase is selected from the group consisting of Thermus aquaticus ligase, Thermus thermophilus ligase, E. coli ligase, T4 ligase, and Pyrococcus ligase.

112. A kit according to claim 106 further comprising:
amplification primers suitable for preliminary amplification of the target nucleotide sequences and
a polymerase.

113. A kit according to claim 106, wherein the support includes different capture oligonucleotides immobilized at different particular sites with different capture oligonucleotides being complementary to different addressable array-specific portions, whereby different oligonucleotide probe sets are hybridized and detected at different sites on the support.

114. A kit according to claim 106, wherein the support includes identical capture oligonucleotides immobilized on the support with the capture oligonucleotides complementary to all the addressable array-specific portions and the labels attached to the oligonucleotide probe sets being different, whereby the oligonucleotide probe sets are detected and distinguished by the different labels.

115. A kit according to claim 106, wherein the oligonucleotide probe sets and the capture oligonucleotides are configured so that the oligonucleotide probe sets hybridize, respectively, to the target nucleotide sequences at temperatures which are less than that at which the capture oligonucleotides hybridize to the addressable array-specific portions of the oligonucleotide probes sets.

116. A kit according to claim 106, wherein the collection of double multimer units is shown in FIG. 26.

117. A kit according to claim 106, wherein the collection of double multimer units is shown in FIG. 27.

118. A kit according to claim 106, wherein the collection of double multimer units removed has a melting temperature in ° C. of less than 12.5 times the number of tetramers and more than 14 times the number of tetramers.

119. A kit according to claim 106, wherein the double multimer units have 24 mers and the melting point of the double multimer units is 75-84° C.

120. A kit according to claim 106, wherein the set of tetramers is shown in Table 1 or complements thereof.

121. A kit according to claim 106, wherein the set of tetramers are one base circular permutations of the tetramers shown in Table 1 and complements thereof.

122. A kit according to claim 106, wherein the set of tetramers are two base circular permutations of the tetramers shown in Table 1 and complements thereof.

123. A kit according to claim 106, wherein the set of tetramers are three base circular permutations of the tetramers shown in Table 1 and complements thereof.

124. A method to avoid synthesizing ligase detection reaction oligonucleotides that will inappropriately cross-hybridize to capture oligonucleotides on a solid support comprising
comparing the ligase detection reaction oligonucleotides with the capture oligonucleotides and
identifying any capture oligonucleotides likely to cross-hybridize to the ligase detection reaction oligonucleotides.

The application's sequence listing, which the Patent Office published only in electronic form, follows.

SEQUENCE LISTING (9544 sequences)

SEQ ID NO: 1 - DNA, 24 bp, Artificial Sequence
  Description of Artificial Sequence:  Hypothetical Probe Sequence
ttgaaatccagcgcaaaatctgcg

SEQ ID NO: 2 - DNA, 24 bp, Artificial Sequence
  Description of Artificial Sequence:  Hypothetical Probe Sequence
ttgaaaagcctacacgacggcgaa

SEQ ID NO: 3 - DNA, 24 bp, Artificial Sequence
  Description of Artificial Sequence:  Hypothetical Probe Sequence
ttgatctgccatacgggcttacgg

SEQ ID NO: 4 - DNA, 24 bp, Artificial Sequence
  Description of Artificial Sequence:  Hypothetical Probe Sequence
ttgacttgtccccagcacggccat

SEQ ID NO: 5 - DNA, 24 bp, Artificial Sequence
  Description of Artificial Sequence:  Hypothetical Probe Sequence
ttgacgttgaccagcccgttgcaa

SEQ ID NO: 6 - DNA, 24 bp, Artificial Sequence
  Description of Artificial Sequence:  Hypothetical Probe Sequence
ttgacgaagctttcccccatgatg

SEQ ID NO: 7 - DNA, 24 bp, Artificial Sequence
  Description of Artificial Sequence:  Hypothetical Probe Sequence
ttgagcaaggacgaccgcaaacgg

SEQ ID NO: 8 - DNA, 24 bp, Artificial Sequence
  Description of Artificial Sequence:  Hypothetical Probe Sequence
ttgagatgacggacggtgcggcaa

SEQ ID NO: 9 - DNA, 24 bp, Artificial Sequence
  Description of Artificial Sequence:  Hypothetical Probe Sequence
ttgatcccatcgaaagggacgatg

SEQ ID NO: 10 - DNA, 24 bp, Artificial Sequence
  Description of Artificial Sequence:  Hypothetical Probe Sequence
ttgatgcgtctgggacgtgccttg

SEQ ID NO: 11 - DNA, 24 bp, Artificial Sequence
  Description of Artificial Sequence:  Hypothetical Probe Sequence
ttgacacgtcgtcagctcccgtgc

SEQ ID NO: 12 - DNA, 24 bp, Artificial Sequence
  Description of Artificial Sequence:  Hypothetical Probe Sequence
ttgacagcctgttgcggtgcgtct

SEQ ID NO: 13 - DNA, 24 bp, Artificial Sequence
  Description of Artificial Sequence:  Hypothetical Probe Sequence
ttgagtgcggtacttgcagcgatg

SEQ ID NO: 14 - DNA, 24 bp, Artificial Sequence
  Description of Artificial Sequence:  Hypothetical Probe Sequence
ttgaacggtctgcacgtcccagcc

SEQ ID NO: 15 - DNA, 24 bp, Artificial Sequence
  Description of Artificial Sequence:  Hypothetical Probe Sequence
tgattctggtgcgtgccagccagc

SEQ ID NO: 16 - DNA, 24 bp, Artificial Sequence
  Description of Artificial Sequence:  Hypothetical Probe Sequence
tgattgtcgctttctgacggagcc

SEQ ID NO: 17 - DNA, 24 bp, Artificial Sequence
  Description of Artificial Sequence:  Hypothetical Probe Sequence
tgatcgtttgcgggtatccctcgt

SEQ ID NO: 18 - DNA, 24 bp, Artificial Sequence
  Description of Artificial Sequence:  Hypothetical Probe Sequence
tgatcgaaaggacagcagcctccc

SEQ ID NO: 19 - DNA, 24 bp, Artificial Sequence
  Description of Artificial Sequence:  Hypothetical Probe Sequence
tgatgcaagcaacgaacacgctgt

SEQ ID NO: 20 - DNA, 24 bp, Artificial Sequence
  Description of Artificial Sequence:  Hypothetical Probe Sequence
tgattgcgagtggaccatcgccat

SEQ ID NO: 21 - DNA, 24 bp, Artificial Sequence
  Description of Artificial Sequence:  Hypothetical Probe Sequence
tgatcacgcttgccatggacggac

SEQ ID NO: 22 - DNA, 24 bp, Artificial Sequence
  Description of Artificial Sequence:  Hypothetical Probe Sequence
tgatgtgcctcaacgggtgcagcc

SEQ ID NO: 23 - DNA, 24 bp, Artificial Sequence
  Description of Artificial Sequence:  Hypothetical Probe Sequence
tgatggaccgttagccgatgttga

SEQ ID NO: 24 - DNA, 24 bp, Artificial Sequence
  Description of Artificial Sequence:  Hypothetical Probe Sequence
tgatacggaggaggactgcgtgcg

SEQ ID NO: 25 - DNA, 24 bp, Artificial Sequence
  Description of Artificial Sequence:  Hypothetical Probe Sequence
ttaggatgagccagcctgcgagcc

SEQ ID NO: 26 - DNA, 24 bp, Artificial Sequence
  Description of Artificial Sequence:  Hypothetical Probe Sequence
aatctcgtcgtttcccctcatgcg

SEQ ID NO: 27 - DNA, 24 bp, Artificial Sequence
  Description of Artificial Sequence:  Hypothetical Probe Sequence
aatcgcaactgtcgttcacggtgc

SEQ ID NO: 28 - DNA, 24 bp, Artificial Sequence
  Description of Artificial Sequence:  Hypothetical Probe Sequence
aatcaggacacgcagcgacctgcg

SEQ ID NO: 29 - DNA, 24 bp, Artificial Sequence
  Description of Artificial Sequence:  Hypothetical Probe Sequence
aatcgaccctgtgtctgctttgcg

SEQ ID NO: 30 - DNA, 24 bp, Artificial Sequence
  Description of Artificial Sequence:  Hypothetical Probe Sequence
aatcagccaaagcgaagtgcgatg

SEQ ID NO: 31 - DNA, 24 bp, Artificial Sequence
  Description of Artificial Sequence:  Hypothetical Probe Sequence
atacgacctcgtgagttcccgcaa

SEQ ID NO: 32 - DNA, 24 bp, Artificial Sequence
  Description of Artificial Sequence:  Hypothetical Probe Sequence
aaagcttgacctatcgagccgtgc

SEQ ID NO: 33 - DNA, 24 bp, Artificial Sequence
  Description of Artificial Sequence:  Hypothetical Probe Sequence
aaagagccgcttgagtcgaaatcg

SEQ ID NO: 34 - DNA, 24 bp, Artificial Sequence
  Description of Artificial Sequence:  Hypothetical Probe Sequence
tctgcttgctcacctaccattgcg

SEQ ID NO: 35 - DNA, 24 bp, Artificial Sequence
  Description of Artificial Sequence:  Hypothetical Probe Sequence
tctgatcgcctaggtaacggggac

SEQ ID NO: 36 - DNA, 24 bp, Artificial Sequence
  Description of Artificial Sequence:  Hypothetical Probe Sequence
tctgcagcggtactgtggacccat

SEQ ID NO: 37 - DNA, 24 bp, Artificial Sequence
  Description of Artificial Sequence:  Hypothetical Probe Sequence
tctgagccacctaatctcccacgg

SEQ ID NO: 38 - DNA, 24 bp, Artificial Sequence
  Description of Artificial Sequence:  Hypothetical Probe Sequence
tgtctcgttcccacctccattccc

SEQ ID NO: 39 - DNA, 24 bp, Artificial Sequence
  Description of Artificial Sequence:  Hypothetical Probe Sequence
tgtcatcgcagcgagtcagccacg

SEQ ID NO: 40 - DNA, 24 bp, Artificial Sequence
  Description of Artificial Sequence:  Hypothetical Probe Sequence
tgtccctaacctgatggtgcgcaa

SEQ ID NO: 41 - DNA, 24 bp, Artificial Sequence
  Description of Artificial Sequence:  Hypothetical Probe Sequence
tgtctgcggtctccatatcggtgc

SEQ ID NO: 42 - DNA, 24 bp, Artificial Sequence
  Description of Artificial Sequence:  Hypothetical Probe Sequence
tgtccacgcgttaccttgtcgatg

SEQ ID NO: 43 - DNA, 24 bp, Artificial Sequence
  Description of Artificial Sequence:  Hypothetical Probe Sequence
tgtcgtgctctgaccttgcgctca

SEQ ID NO: 44 - DNA, 24 bp, Artificial Sequence
  Description of Artificial Sequence:  Hypothetical Probe Sequence
tgtcacggaatcgtgctgcggctt

SEQ ID NO: 45 - DNA, 24 bp, Artificial Sequence
  Description of Artificial Sequence:  Hypothetical Probe Sequence
tcgttctggcttggacgcttctca

SEQ ID NO: 46 - DNA, 24 bp, Artificial Sequence
  Description of Artificial Sequence:  Hypothetical Probe Sequence
tcgttgcgtgtcggaccttggatg

SEQ ID NO: 47 - DNA, 24 bp, Artificial Sequence
  Description of Artificial Sequence:  Hypothetical Probe Sequence
cttgcgttgatgcgaatcgtcgaa

SEQ ID NO: 48 - DNA, 24 bp, Artificial Sequence
  Description of Artificial Sequence:  Hypothetical Probe Sequence
ctgtcacgctcaaccttccccgtt

SEQ ID NO: 49 - DNA, 24 bp, Artificial Sequence
  Description of Artificial Sequence:  Hypothetical Probe Sequence
ctgtgtgccgtttcgtgtgcagtg

SEQ ID NO: 50 - DNA, 24 bp, Artificial Sequence
  Description of Artificial Sequence:  Hypothetical Probe Sequence
ccatgcaatcccaggatgtcggta

SEQ ID NO: 51 - DNA, 24 bp, Artificial Sequence
  Description of Artificial Sequence:  Hypothetical Probe Sequence
ccatcagctctggcaatgcggagt

SEQ ID NO: 52 - DNA, 24 bp, Artificial Sequence
  Description of Artificial Sequence:  Hypothetical Probe Sequence
cgaatctgggtaaggaagccatcg

SEQ ID NO: 53 - DNA, 24 bp, Artificial Sequence
  Description of Artificial Sequence:  Hypothetical Probe Sequence
cgaatgtcctgtccatcgaatgcg

SEQ ID NO: 54 - DNA, 24 bp, Artificial Sequence
  Description of Artificial Sequence:  Hypothetical Probe Sequence
cgaacgtttacatgcgtcgtagcc

SEQ ID NO: 55 - DNA, 24 bp, Artificial Sequence
  Description of Artificial Sequence:  Hypothetical Probe Sequence
cgaaagtgagccgcaacttgggac

SEQ ID NO: 56 - DNA, 24 bp, Artificial Sequence
  Description of Artificial Sequence:  Hypothetical Probe Sequence
cgaaggacagtgagtgtgcgcacg

SEQ ID NO: 57 - DNA, 24 bp, Artificial Sequence
  Description of Artificial Sequence:  Hypothetical Probe Sequence
gcaaagccataccttggcttgctt

SEQ ID NO: 58 - DNA, 24 bp, Artificial Sequence
  Description of Artificial Sequence:  Hypothetical Probe Sequence
acctcttgcctacgaacagccgaa

SEQ ID NO: 59 - DNA, 24 bp, Artificial Sequence
  Description of Artificial Sequence:  Hypothetical Probe Sequence
acctgcaagtgcccatgtgcccta

SEQ ID NO: 60 - DNA, 24 bp, Artificial Sequence
  Description of Artificial Sequence:  Hypothetical Probe Sequence
aggatctggaccggactccccgaa

SEQ ID NO: 61 - DNA, 24 bp, Artificial Sequence
  Description of Artificial Sequence:  Hypothetical Probe Sequence
aggaacggcagctacacacgagcc

SEQ ID NO: 62 - DNA, 24 bp, Artificial Sequence
  Description of Artificial Sequence:  Hypothetical Probe Sequence
gatggaccacctcagcgcttgacc

SEQ ID NO: 63 - DNA, 24 bp, Artificial Sequence
  Description of Artificial Sequence:  Hypothetical Probe Sequence
tcccttaggacccagcgtctgtgc

SEQ ID NO: 64 - DNA, 24 bp, Artificial Sequence
  Description of Artificial Sequence:  Hypothetical Probe Sequence
tgcgccataaaggaccttagccat

SEQ ID NO: 65 - DNA, 24 bp, Artificial Sequence
  Description of Artificial Sequence:  Hypothetical Probe Sequence
tgcgaggaccatggtaggtaagcc

SEQ ID NO: 66 - DNA, 24 bp, Artificial Sequence
  Description of Artificial Sequence:  Hypothetical Probe Sequence
ttgatcgtggacacggcacgctca

SEQ ID NO: 67 - DNA, 24 bp, Artificial Sequence
  Description of Artificial Sequence:  Hypothetical Probe Sequence
ttgaagtgcagccacgaaagcgaa

SEQ ID NO: 68 - DNA, 24 bp, Artificial Sequence
  Description of Artificial Sequence:  Hypothetical Probe Sequence
ttgaatcggagttgcgcgttggac

SEQ ID NO: 69 - DNA, 24 bp, Artificial Sequence
  Description of Artificial Sequence:  Hypothetical Probe Sequence
tgatgatggcttcagctgcgcgaa

SEQ ID NO: 70 - DNA, 24 bp, Artificial Sequence
  Description of Artificial Sequence:  Hypothetical Probe Sequence
tgattcccttgaacggtcccggac

SEQ ID NO: 71 - DNA, 24 bp, Artificial Sequence
  Description of Artificial Sequence:  Hypothetical Probe Sequence
ttaggcaattgatcccgaccgtgc

SEQ ID NO: 72 - DNA, 24 bp, Artificial Sequence
  Description of Artificial Sequence:  Hypothetical Probe Sequence
ttagtcccacgggatgcgttgacc

SEQ ID NO: 73 - DNA, 24 bp, Artificial Sequence
  Description of Artificial Sequence:  Hypothetical Probe Sequence
aatcggacatcgagtgtccccagc

SEQ ID NO: 74 - DNA, 24 bp, Artificial Sequence
  Description of Artificial Sequence:  Hypothetical Probe Sequence
atactgcgcgttctgtgagttgcg

SEQ ID NO: 75 - DNA, 24 bp, Artificial Sequence
  Description of Artificial Sequence:  Hypothetical Probe Sequence
tctggtctgcaatcgtcacgcagc

SEQ ID NO: 76 - DNA, 24 bp, Artificial Sequence
  Description of Artificial Sequence:  Hypothetical Probe Sequence
tgtcagtgcacggcttctgttgcg

SEQ ID NO: 77 - DNA, 24 bp, Artificial Sequence
  Description of Artificial Sequence:  Hypothetical Probe Sequence
tcgtctcagcttgaccgcttcagc

SEQ ID NO: 78 - DNA, 24 bp, Artificial Sequence
  Description of Artificial Sequence:  Hypothetical Probe Sequence
tcgtcagccctaatcgacctgtgc

SEQ ID NO: 79 - DNA, 24 bp, Artificial Sequence
  Description of Artificial Sequence:  Hypothetical Probe Sequence
tcgtgtgcgcttaatcacggaatc

SEQ ID NO: 80 - DNA, 24 bp, Artificial Sequence
  Description of Artificial Sequence:  Hypothetical Probe Sequence
cgttcgaagtctcttgacggacgg

SEQ ID NO: 81 - DNA, 24 bp, Artificial Sequence
  Description of Artificial Sequence:  Hypothetical Probe Sequence
cgtttcccaatcatcggcaagtct

SEQ ID NO: 82 - DNA, 24 bp, Artificial Sequence
  Description of Artificial Sequence:  Hypothetical Probe Sequence
cgttgtgctgatgcaaatcggctt

SEQ ID NO: 83 - DNA, 24 bp, Artificial Sequence
  Description of Artificial Sequence:  Hypothetical Probe Sequence
ctgtcttggtgcgcaaaggatgcg

SEQ ID NO: 84 - DNA, 24 bp, Artificial Sequence
  Description of Artificial Sequence:  Hypothetical Probe Sequence
cgaatcgtttgagcaagacccacg

SEQ ID NO: 85 - DNA, 24 bp, Artificial Sequence
  Description of Artificial Sequence:  Hypothetical Probe Sequence
cgaacagctgcgaatcgtctagcc

SEQ ID NO: 86 - DNA, 24 bp, Artificial Sequence
  Description of Artificial Sequence:  Hypothetical Probe Sequence
gagttcgtgcttacggcttgagcc

SEQ ID NO: 87 - DNA, 24 bp, Artificial Sequence
  Description of Artificial Sequence:  Hypothetical Probe Sequence
agtgtcccgagtacctggacacgg

SEQ ID NO: 88 - DNA, 24 bp, Artificial Sequence
  Description of Artificial Sequence:  Hypothetical Probe Sequence
tcccgctttgattctgtcgttcgt

SEQ ID NO: 89 - DNA, 24 bp, Artificial Sequence
  Description of Artificial Sequence:  Hypothetical Probe Sequence
tcccacctgtctacctagccgacc

SEQ ID NO: 90 - DNA, 24 bp, Artificial Sequence
  Description of Artificial Sequence:  Hypothetical Probe Sequence
tccccacgatacacctttgatgcg

SEQ ID NO: 91 - DNA, 24 bp, Artificial Sequence
  Description of Artificial Sequence:  Hypothetical Probe Sequence
tgcgcttgatactgtcgcttcgaa

SEQ ID NO: 92 - DNA, 24 bp, Artificial Sequence
  Description of Artificial Sequence:  Hypothetical Probe Sequence
tgcgctcaatacagcctcgtatcg

SEQ ID NO: 93 - DNA, 24 bp, Artificial Sequence
  Description of Artificial Sequence:  Hypothetical Probe Sequence
tgcgatcgcgaagcaatgatcgtt

SEQ ID NO: 94 - DNA, 24 bp, Artificial Sequence
  Description of Artificial Sequence:  Hypothetical Probe Sequence
tgcgtccctctgtgatcacgagga

SEQ ID NO: 95 - DNA, 24 bp, Artificial Sequence
  Description of Artificial Sequence:  Hypothetical Probe Sequence
tgcgcacgaggaatcgcttgagtg

SEQ ID NO: 96 - DNA, 24 bp, Artificial Sequence
  Description of Artificial Sequence:  Hypothetical Probe Sequence
cacggtgctacagtgcaaagcacg

SEQ ID NO: 97 - DNA, 24 bp, Artificial Sequence
  Description of Artificial Sequence:  Hypothetical Probe Sequence
ttgaaaagggacgtgcgcttcgaa

SEQ ID NO: 98 - DNA, 24 bp, Artificial Sequence
  Description of Artificial Sequence:  Hypothetical Probe Sequence
ttgatctgcacgcgttgtgcggta

SEQ ID NO: 99 - DNA, 24 bp, Artificial Sequence
  Description of Artificial Sequence:  Hypothetical Probe Sequence
ttgatgtcccattccccacgcgtt

SEQ ID NO: 100 - DNA, 24 bp, Artificial Sequence
  Description of Artificial Sequence:  Hypothetical Probe Sequence
ttgatcgtagccggtatgcgacgg

SEQ ID NO: 101 - DNA, 24 bp, Artificial Sequence
  Description of Artificial Sequence:  Hypothetical Probe Sequence
ttgaccatgcttcgaaacggcgaa

SEQ ID NO: 102 - DNA, 24 bp, Artificial Sequence
  Description of Artificial Sequence:  Hypothetical Probe Sequence
ttgacgaaatcggcaacctatgcg

SEQ ID NO: 103 - DNA, 24 bp, Artificial Sequence
  Description of Artificial Sequence:  Hypothetical Probe Sequence
ttgatcccggtattagagcccacg

SEQ ID NO: 104 - DNA, 24 bp, Artificial Sequence
  Description of Artificial Sequence:  Hypothetical Probe Sequence
ttgatgcgtgcgctcaatcgagga

SEQ ID NO: 105 - DNA, 24 bp, Artificial Sequence
  Description of Artificial Sequence:  Hypothetical Probe Sequence
ttgatgcgagccgatgccatcttg

SEQ ID NO: 106 - DNA, 24 bp, Artificial Sequence
  Description of Artificial Sequence:  Hypothetical Probe Sequence
ttgacagcacgggacccctacacg

SEQ ID NO: 107 - DNA, 24 bp, Artificial Sequence
  Description of Artificial Sequence:  Hypothetical Probe Sequence
ttgagtgctcccgcaacgttgtgc

SEQ ID NO: 108 - DNA, 24 bp, Artificial Sequence
  Description of Artificial Sequence:  Hypothetical Probe Sequence
ttgaacgggcaaacctcttgcttg

SEQ ID NO: 109 - DNA, 24 bp, Artificial Sequence
  Description of Artificial Sequence:  Hypothetical Probe Sequence
ttgaacgggatggcaaggacctca

SEQ ID NO: 110 - DNA, 24 bp, Artificial Sequence
  Description of Artificial Sequence:  Hypothetical Probe Sequence
ttgaagcctgtccgtttgcgacgg

SEQ ID NO: 111 - DNA, 24 bp, Artificial Sequence
  Description of Artificial Sequence:  Hypothetical Probe Sequence
ttgaagccaggatcccaaagccta

SEQ ID NO: 112 - DNA, 24 bp, Artificial Sequence
  Description of Artificial Sequence:  Hypothetical Probe Sequence
tgattctgacggtcccgcttacgg

SEQ ID NO: 113 - DNA, 24 bp, Artificial Sequence
  Description of Artificial Sequence:  Hypothetical Probe Sequence
tgattgtccacgtgcgggacacgg

SEQ ID NO: 114 - DNA, 24 bp, Artificial Sequence
  Description of Artificial Sequence:  Hypothetical Probe Sequence
tgatcgaagtgccacgcacgcgtt

SEQ ID NO: 115 - DNA, 24 bp, Artificial Sequence
  Description of Artificial Sequence:  Hypothetical Probe Sequence
tgatggtaacggctcaagccgctt

SEQ ID NO: 116 - DNA, 24 bp, Artificial Sequence
  Description of Artificial Sequence:  Hypothetical Probe Sequence
tgatgcaaagccgtgcagcctctg

SEQ ID NO: 117 - DNA, 24 bp, Artificial Sequence
  Description of Artificial Sequence:  Hypothetical Probe Sequence
tgatgatggtgcgcttagccgcaa

SEQ ID NO: 118 - DNA, 24 bp, Artificial Sequence
  Description of Artificial Sequence:  Hypothetical Probe Sequence
tgattccctcccggtatcgtacgg

SEQ ID NO: 119 - DNA, 24 bp, Artificial Sequence
  Description of Artificial Sequence:  Hypothetical Probe Sequence
tgattccccacggagtggaccagc

SEQ ID NO: 120 - DNA, 24 bp, Artificial Sequence
  Description of Artificial Sequence:  Hypothetical Probe Sequence
tgatcacgatcgggacgcaacacg

SEQ ID NO: 121 - DNA, 24 bp, Artificial Sequence
  Description of Artificial Sequence:  Hypothetical Probe Sequence
tgatcacgtcccttgagaccgcaa

SEQ ID NO: 122 - DNA, 24 bp, Artificial Sequence
  Description of Artificial Sequence:  Hypothetical Probe Sequence
tgatcagccacgggacagccagtg

SEQ ID NO: 123 - DNA, 24 bp, Artificial Sequence
  Description of Artificial Sequence:  Hypothetical Probe Sequence
tgatcagcggacttagtcccgtgc

SEQ ID NO: 124 - DNA, 24 bp, Artificial Sequence
  Description of Artificial Sequence:  Hypothetical Probe Sequence
tgatgacccgaatgattgtcgcaa

SEQ ID NO: 125 - DNA, 24 bp, Artificial Sequence
  Description of Artificial Sequence:  Hypothetical Probe Sequence
tgatgaccatcgagcccacgagga

SEQ ID NO: 126 - DNA, 24 bp, Artificial Sequence
  Description of Artificial Sequence:  Hypothetical Probe Sequence
tgatgtgccgaagagtcacgggac

SEQ ID NO: 127 - DNA, 24 bp, Artificial Sequence
  Description of Artificial Sequence:  Hypothetical Probe Sequence
tgatgtgcgtctacggagcctgcg

SEQ ID NO: 128 - DNA, 24 bp, Artificial Sequence
  Description of Artificial Sequence:  Hypothetical Probe Sequence
tgatgtgcgagtacggacggcgtt

SEQ ID NO: 129 - DNA, 24 bp, Artificial Sequence
  Description of Artificial Sequence:  Hypothetical Probe Sequence
tgatgtgctgcgaaagaggatccc

SEQ ID NO: 130 - DNA, 24 bp, Artificial Sequence
  Description of Artificial Sequence:  Hypothetical Probe Sequence
tgatggacgacccgaaggaccttg

SEQ ID NO: 131 - DNA, 24 bp, Artificial Sequence
  Description of Artificial Sequence:  Hypothetical Probe Sequence
tgatggacagccgcttgaccgatg

SEQ ID NO: 132 - DNA, 24 bp, Artificial Sequence
  Description of Artificial Sequence:  Hypothetical Probe Sequence
ttaggcaatgcgctgtcctaacgg

SEQ ID NO: 133 - DNA, 24 bp, Artificial Sequence
  Description of Artificial Sequence:  Hypothetical Probe Sequence
ttagatcgcacgtctgcttgccat

SEQ ID NO: 134 - DNA, 24 bp, Artificial Sequence
  Description of Artificial Sequence:  Hypothetical Probe Sequence
ttagcagcgcaatacaggaccacg

SEQ ID NO: 135 - DNA, 24 bp, Artificial Sequence
  Description of Artificial Sequence:  Hypothetical Probe Sequence
ttagggacctgtgtgccttgcgtt

SEQ ID NO: 136 - DNA, 24 bp, Artificial Sequence
  Description of Artificial Sequence:  Hypothetical Probe Sequence
ttagggacggacaatcgatgcacg

SEQ ID NO: 137 - DNA, 24 bp, Artificial Sequence
  Description of Artificial Sequence:  Hypothetical Probe Sequence
aatctctgcgttcctatgcgcgaa

SEQ ID NO: 138 - DNA, 24 bp, Artificial Sequence
  Description of Artificial Sequence:  Hypothetical Probe Sequence
aatccgtttcccatacgatgcgaa

SEQ ID NO: 139 - DNA, 24 bp, Artificial Sequence
  Description of Artificial Sequence:  Hypothetical Probe Sequence
aatccgaatctgtccctcccggac

SEQ ID NO: 140 - DNA, 24 bp, Artificial Sequence
  Description of Artificial Sequence:  Hypothetical Probe Sequence
aatccgaagcaaacggtgtcgatg

SEQ ID NO: 141 - DNA, 24 bp, Artificial Sequence
  Description of Artificial Sequence:  Hypothetical Probe Sequence
aatccgaacacggaccggacagtg

SEQ ID NO: 142 - DNA, 24 bp, Artificial Sequence
  Description of Artificial Sequence:  Hypothetical Probe Sequence
aatcgcttttaggatgcagcacgg

SEQ ID NO: 143 - DNA, 24 bp, Artificial Sequence
  Description of Artificial Sequence:  Hypothetical Probe Sequence
aatcgcttccatcgaagaccggta

SEQ ID NO: 144 - DNA, 24 bp, Artificial Sequence
  Description of Artificial Sequence:  Hypothetical Probe Sequence
aatcgagtcgaatgcgtcccagcc

SEQ ID NO: 145 - DNA, 24 bp, Artificial Sequence
  Description of Artificial Sequence:  Hypothetical Probe Sequence
aatcaggaacggcgttcttggctt

SEQ ID NO: 146 - DNA, 24 bp, Artificial Sequence
  Description of Artificial Sequence:  Hypothetical Probe Sequence
aatctgcgtcgttctgtcccgatg

SEQ ID NO: 147 - DNA, 24 bp, Artificial Sequence
  Description of Artificial Sequence:  Hypothetical Probe Sequence
aatccagcgatgggacgagtcgtt

SEQ ID NO: 148 - DNA, 24 bp, Artificial Sequence
  Description of Artificial Sequence:  Hypothetical Probe Sequence
aatcgtgcaggactcaggactgcg

SEQ ID NO: 149 - DNA, 24 bp, Artificial Sequence
  Description of Artificial Sequence:  Hypothetical Probe Sequence
aatcggactgcgccatacctgcaa

SEQ ID NO: 150 - DNA, 24 bp, Artificial Sequence
  Description of Artificial Sequence:  Hypothetical Probe Sequence
aatcagccatcgctgtgcttgcaa

SEQ ID NO: 151 - DNA, 24 bp, Artificial Sequence
  Description of Artificial Sequence:  Hypothetical Probe Sequence
aatcagccgtgcggtagaccggac

SEQ ID NO: 152 - DNA, 24 bp, Artificial Sequence
  Description of Artificial Sequence:  Hypothetical Probe Sequence
atacgcttggacgagttgcggcaa

SEQ ID NO: 153 - DNA, 24 bp, Artificial Sequence
  Description of Artificial Sequence:  Hypothetical Probe Sequence
atacgcaagaccatcgcacggcaa

SEQ ID NO: 154 - DNA, 24 bp, Artificial Sequence
  Description of Artificial Sequence:  Hypothetical Probe Sequence
ataccagcctcaagcccgaagtgc

SEQ ID NO: 155 - DNA, 24 bp, Artificial Sequence
  Description of Artificial Sequence:  Hypothetical Probe Sequence
atacgtgctcgtgctttgcgtgcg

SEQ ID NO: 156 - DNA, 24 bp, Artificial Sequence
  Description of Artificial Sequence:  Hypothetical Probe Sequence
aaagcgtttgtccttggatgcgaa

SEQ ID NO: 157 - DNA, 24 bp, Artificial Sequence
  Description of Artificial Sequence:  Hypothetical Probe Sequence
aaagctcatcgtggaccgaaagcc

SEQ ID NO: 158 - DNA, 24 bp, Artificial Sequence
  Description of Artificial Sequence:  Hypothetical Probe Sequence
aaagcgaactgtagtgcagcacgg

SEQ ID NO: 159 - DNA, 24 bp, Artificial Sequence
  Description of Artificial Sequence:  Hypothetical Probe Sequence
aaagatcgcttgctgtacggcgaa

SEQ ID NO: 160 - DNA, 24 bp, Artificial Sequence
  Description of Artificial Sequence:  Hypothetical Probe Sequence
aaagatcgggtatgcgcacgtgtc

SEQ ID NO: 161 - DNA, 24 bp, Artificial Sequence
  Description of Artificial Sequence:  Hypothetical Probe Sequence
aaagtgcgatcgaggactcaacgg

SEQ ID NO: 162 - DNA, 24 bp, Artificial Sequence
  Description of Artificial Sequence:  Hypothetical Probe Sequence
aaaggaccgcaactgttcgtgctt

SEQ ID NO: 163 - DNA, 24 bp, Artificial Sequence
  Description of Artificial Sequence:  Hypothetical Probe Sequence
aaagggaccgaaagtgccatggac

SEQ ID NO: 164 - DNA, 24 bp, Artificial Sequence
  Description of Artificial Sequence:  Hypothetical Probe Sequence
tacaccattccctccccagcgcaa

SEQ ID NO: 165 - DNA, 24 bp, Artificial Sequence
  Description of Artificial Sequence:  Hypothetical Probe Sequence
tacatccccttgcgaatgcgtgcg

SEQ ID NO: 166 - DNA, 24 bp, Artificial Sequence
  Description of Artificial Sequence:  Hypothetical Probe Sequence
tacaacggctgttcgttgtcgcaa

SEQ ID NO: 167 - DNA, 24 bp, Artificial Sequence
  Description of Artificial Sequence:  Hypothetical Probe Sequence
tacaacgggctttgtccacggagt

SEQ ID NO: 168 - DNA, 24 bp, Artificial Sequence
  Description of Artificial Sequence:  Hypothetical Probe Sequence
tacaacggacggccatccatgctt

SEQ ID NO: 169 - DNA, 24 bp, Artificial Sequence
  Description of Artificial Sequence:  Hypothetical Probe Sequence
tctgttgaagcccgttcgaaacgg

SEQ ID NO: 170 - DNA, 24 bp, Artificial Sequence
  Description of Artificial Sequence:  Hypothetical Probe Sequence
tctgtgattgcgcttgggacgatg

SEQ ID NO: 171 - DNA, 24 bp, Artificial Sequence
  Description of Artificial Sequence:  Hypothetical Probe Sequence
tctgaatctgcgcgaatgtctgcg

SEQ ID NO: 172 - DNA, 24 bp, Artificial Sequence
  Description of Artificial Sequence:  Hypothetical Probe Sequence
tctgaatccacgttagtgcgcacg

SEQ ID NO: 173 - DNA, 24 bp, Artificial Sequence
  Description of Artificial Sequence:  Hypothetical Probe Sequence
tctgcttgctgtgctttcccccta

SEQ ID NO: 174 - DNA, 24 bp, Artificial Sequence
  Description of Artificial Sequence:  Hypothetical Probe Sequence
tctgcttggcttagtggcttcacg

SEQ ID NO: 175 - DNA, 24 bp, Artificial Sequence
  Description of Artificial Sequence:  Hypothetical Probe Sequence
tctgcttggatgccatacggtgcg

SEQ ID NO: 176 - DNA, 24 bp, Artificial Sequence
  Description of Artificial Sequence:  Hypothetical Probe Sequence
tctgcttggaccctgtcacggcaa

SEQ ID NO: 177 - DNA, 24 bp, Artificial Sequence
  Description of Artificial Sequence:  Hypothetical Probe Sequence
tctgcgttatcgcacggagtgcaa

SEQ ID NO: 178 - DNA, 24 bp, Artificial Sequence
  Description of Artificial Sequence:  Hypothetical Probe Sequence
tctgcgttagccggacctgtcacg

SEQ ID NO: 179 - DNA, 24 bp, Artificial Sequence
  Description of Artificial Sequence:  Hypothetical Probe Sequence
tctgccatgaccgacctccccttg

SEQ ID NO: 180 - DNA, 24 bp, Artificial Sequence
  Description of Artificial Sequence:  Hypothetical Probe Sequence
tctggctttgtccagcgcaatccc

SEQ ID NO: 181 - DNA, 24 bp, Artificial Sequence
  Description of Artificial Sequence:  Hypothetical Probe Sequence
tctggcttgtgcgtctgtgccgtt

SEQ ID NO: 182 - DNA, 24 bp, Artificial Sequence
  Description of Artificial Sequence:  Hypothetical Probe Sequence
tctgggtacgttcgaatcccccat

SEQ ID NO: 183 - DNA, 24 bp, Artificial Sequence
  Description of Artificial Sequence:  Hypothetical Probe Sequence
tctgggtagtgcatcgcgaagctt

SEQ ID NO: 184 - DNA, 24 bp, Artificial Sequence
  Description of Artificial Sequence:  Hypothetical Probe Sequence
tctgacctacgggtgccgttgtgc

SEQ ID NO: 185 - DNA, 24 bp, Artificial Sequence
  Description of Artificial Sequence:  Hypothetical Probe Sequence
tctgatcgtgcggtctacgggtgc

SEQ ID NO: 186 - DNA, 24 bp, Artificial Sequence
  Description of Artificial Sequence:  Hypothetical Probe Sequence
tctgatcgggaccagcatcggacc

SEQ ID NO: 187 - DNA, 24 bp, Artificial Sequence
  Description of Artificial Sequence:  Hypothetical Probe Sequence
tctgtcccctgtgaccagccgatg

SEQ ID NO: 188 - DNA, 24 bp, Artificial Sequence
  Description of Artificial Sequence:  Hypothetical Probe Sequence
tctgtgcgaaagggaccagcagga

SEQ ID NO: 189 - DNA, 24 bp, Artificial Sequence
  Description of Artificial Sequence:  Hypothetical Probe Sequence
tctgcacgacctttgatcccgatg

SEQ ID NO: 190 - DNA, 24 bp, Artificial Sequence
  Description of Artificial Sequence:  Hypothetical Probe Sequence
tctggtgcaatcgacccacgcagc

SEQ ID NO: 191 - DNA, 24 bp, Artificial Sequence
  Description of Artificial Sequence:  Hypothetical Probe Sequence
tctgagccgacctcgtgatgcttg

SEQ ID NO: 192 - DNA, 24 bp, Artificial Sequence
  Description of Artificial Sequence:  Hypothetical Probe Sequence
tgtctcgtgtgctcgtgaccgcaa

SEQ ID NO: 193 - DNA, 24 bp, Artificial Sequence
  Description of Artificial Sequence:  Hypothetical Probe Sequence
tgtccgttttgaggacgaccatcg

SEQ ID NO: 194 - DNA, 24 bp, Artificial Sequence
  Description of Artificial Sequence:  Hypothetical Probe Sequence
tgtccgtttgattccccttggcaa

SEQ ID NO: 195 - DNA, 24 bp, Artificial Sequence
  Description of Artificial Sequence:  Hypothetical Probe Sequence
tgtccgttgtgccgttcagcctgt

SEQ ID NO: 196 - DNA, 24 bp, Artificial Sequence
  Description of Artificial Sequence:  Hypothetical Probe Sequence
tgtcccatttgaaaagcagctgcg

SEQ ID NO: 197 - DNA, 24 bp, Artificial Sequence
  Description of Artificial Sequence:  Hypothetical Probe Sequence
tgtcgcttacggatacagccgatg

SEQ ID NO: 198 - DNA, 24 bp, Artificial Sequence
  Description of Artificial Sequence:  Hypothetical Probe Sequence
tgtcggtaggacatcgggaccacg

SEQ ID NO: 199 - DNA, 24 bp, Artificial Sequence
  Description of Artificial Sequence:  Hypothetical Probe Sequence
tgtcgagtgcttgtgcgtgcgacc

SEQ ID NO: 200 - DNA, 24 bp, Artificial Sequence
  Description of Artificial Sequence:  Hypothetical Probe Sequence
tgtcgcaacttgcttggtgctccc

SEQ ID NO: 201 - DNA, 24 bp, Artificial Sequence
  Description of Artificial Sequence:  Hypothetical Probe Sequence
tgtcgcaaccatcacggtctgctt

SEQ ID NO: 202 - DNA, 24 bp, Artificial Sequence
  Description of Artificial Sequence:  Hypothetical Probe Sequence
tgtcgcaaggtaaatctgcgtccc

SEQ ID NO: 203 - DNA, 24 bp, Artificial Sequence
  Description of Artificial Sequence:  Hypothetical Probe Sequence
tgtcatcggaccaatcatcgcgaa

SEQ ID NO: 204 - DNA, 24 bp, Artificial Sequence
  Description of Artificial Sequence:  Hypothetical Probe Sequence
tgtcaggacgaatcccatcggcaa

SEQ ID NO: 205 - DNA, 24 bp, Artificial Sequence
  Description of Artificial Sequence:  Hypothetical Probe Sequence
tgtcgatgcttgtacatcccgcaa

SEQ ID NO: 206 - DNA, 24 bp, Artificial Sequence
  Description of Artificial Sequence:  Hypothetical Probe Sequence
tgtcgatggatggacctgcgacgg

SEQ ID NO: 207 - DNA, 24 bp, Artificial Sequence
  Description of Artificial Sequence:  Hypothetical Probe Sequence
tgtcgatgtccctcgtgcttgtgc

SEQ ID NO: 208 - DNA, 24 bp, Artificial Sequence
  Description of Artificial Sequence:  Hypothetical Probe Sequence
tgtcgatgtgcgcctacagcatcg

SEQ ID NO: 209 - DNA, 24 bp, Artificial Sequence
  Description of Artificial Sequence:  Hypothetical Probe Sequence
tgtcgatgcacgacctttagcgaa

SEQ ID NO: 210 - DNA, 24 bp, Artificial Sequence
  Description of Artificial Sequence:  Hypothetical Probe Sequence
tgtctgcgcctatgatcttgcagc

SEQ ID NO: 211 - DNA, 24 bp, Artificial Sequence
  Description of Artificial Sequence:  Hypothetical Probe Sequence
tgtccacggcaaaaagcctagacc

SEQ ID NO: 212 - DNA, 24 bp, Artificial Sequence
  Description of Artificial Sequence:  Hypothetical Probe Sequence
tgtccacgcagcaatcagccttga

SEQ ID NO: 213 - DNA, 24 bp, Artificial Sequence
  Description of Artificial Sequence:  Hypothetical Probe Sequence
tgtccagcatcgccatgatggctt

SEQ ID NO: 214 - DNA, 24 bp, Artificial Sequence
  Description of Artificial Sequence:  Hypothetical Probe Sequence
tgtccagccagccttgcgaactgt

SEQ ID NO: 215 - DNA, 24 bp, Artificial Sequence
  Description of Artificial Sequence:  Hypothetical Probe Sequence
tgtcgaccaaagagccagcccgaa

SEQ ID NO: 216 - DNA, 24 bp, Artificial Sequence
  Description of Artificial Sequence:  Hypothetical Probe Sequence
tgtcgaccggtaagccgaccatac

SEQ ID NO: 217 - DNA, 24 bp, Artificial Sequence
  Description of Artificial Sequence:  Hypothetical Probe Sequence
tgtcgaccagtgcagcgatggcaa

SEQ ID NO: 218 - DNA, 24 bp, Artificial Sequence
  Description of Artificial Sequence:  Hypothetical Probe Sequence
tgtcgacctcccgacctcgtcagc

SEQ ID NO: 219 - DNA, 24 bp, Artificial Sequence
  Description of Artificial Sequence:  Hypothetical Probe Sequence
tgtcgaccgtgctgtcaatccacg

SEQ ID NO: 220 - DNA, 24 bp, Artificial Sequence
  Description of Artificial Sequence:  Hypothetical Probe Sequence
tgtcgtgctgtctcgtagcccgaa

SEQ ID NO: 221 - DNA, 24 bp, Artificial Sequence
  Description of Artificial Sequence:  Hypothetical Probe Sequence
tgtcgtgccctatctgtgcggtct

SEQ ID NO: 222 - DNA, 24 bp, Artificial Sequence
  Description of Artificial Sequence:  Hypothetical Probe Sequence
tgtcgtgccagcccataggaatcg

SEQ ID NO: 223 - DNA, 24 bp, Artificial Sequence
  Description of Artificial Sequence:  Hypothetical Probe Sequence
tgtcggacaaagtgcgacggatcg

SEQ ID NO: 224 - DNA, 24 bp, Artificial Sequence
  Description of Artificial Sequence:  Hypothetical Probe Sequence
tgtcggacctcaatacgtgccagc

SEQ ID NO: 225 - DNA, 24 bp, Artificial Sequence
  Description of Artificial Sequence:  Hypothetical Probe Sequence
tgtcggacccatgaccctcaccat

SEQ ID NO: 226 - DNA, 24 bp, Artificial Sequence
  Description of Artificial Sequence:  Hypothetical Probe Sequence
tgtcacggcgttaaagtgtccgaa

SEQ ID NO: 227 - DNA, 24 bp, Artificial Sequence
  Description of Artificial Sequence:  Hypothetical Probe Sequence
tgtcagcccttgcagcaaagcttg

SEQ ID NO: 228 - DNA, 24 bp, Artificial Sequence
  Description of Artificial Sequence:  Hypothetical Probe Sequence
tcgtaaagacggtgtcgcaacacg

SEQ ID NO: 229 - DNA, 24 bp, Artificial Sequence
  Description of Artificial Sequence:  Hypothetical Probe Sequence
tcgtcttgcttgcgttatcgccat

SEQ ID NO: 230 - DNA, 24 bp, Artificial Sequence
  Description of Artificial Sequence:  Hypothetical Probe Sequence
tcgtcgttgcaactcaggtatgcg

SEQ ID NO: 231 - DNA, 24 bp, Artificial Sequence
  Description of Artificial Sequence:  Hypothetical Probe Sequence
tcgtcgttaggaacctacggcgaa

SEQ ID NO: 232 - DNA, 24 bp, Artificial Sequence
  Description of Artificial Sequence:  Hypothetical Probe Sequence
tcgtcgttcacgtacatcgttgcg

SEQ ID NO: 233 - DNA, 24 bp, Artificial Sequence
  Description of Artificial Sequence:  Hypothetical Probe Sequence
tcgtctgttcgtgaccacggtgcg

SEQ ID NO: 234 - DNA, 24 bp, Artificial Sequence
  Description of Artificial Sequence:  Hypothetical Probe Sequence
tcgtccatatcgcagcccatcagc

SEQ ID NO: 235 - DNA, 24 bp, Artificial Sequence
  Description of Artificial Sequence:  Hypothetical Probe Sequence
tcgtccatggaccgaagcaagacc

SEQ ID NO: 236 - DNA, 24 bp, Artificial Sequence
  Description of Artificial Sequence:  Hypothetical Probe Sequence
tcgtacctgtgccagccacggtgc

SEQ ID NO: 237 - DNA, 24 bp, Artificial Sequence
  Description of Artificial Sequence:  Hypothetical Probe Sequence
tcgtatcgctgtacctcgtttgcg

SEQ ID NO: 238 - DNA, 24 bp, Artificial Sequence
  Description of Artificial Sequence:  Hypothetical Probe Sequence
tcgtcctaacggatcgttgaagcc

SEQ ID NO: 239 - DNA, 24 bp, Artificial Sequence
  Description of Artificial Sequence:  Hypothetical Probe Sequence
tcgtgatgatcggtgcacggtccc

SEQ ID NO: 240 - DNA, 24 bp, Artificial Sequence
  Description of Artificial Sequence:  Hypothetical Probe Sequence
tcgttcccctcaagtggaccacct

SEQ ID NO: 241 - DNA, 24 bp, Artificial Sequence
  Description of Artificial Sequence:  Hypothetical Probe Sequence
tcgttcccagtggatgggacccat

SEQ ID NO: 242 - DNA, 24 bp, Artificial Sequence
  Description of Artificial Sequence:  Hypothetical Probe Sequence
tcgttcccgatgaggaacggtgat

SEQ ID NO: 243 - DNA, 24 bp, Artificial Sequence
  Description of Artificial Sequence:  Hypothetical Probe Sequence
tcgttccccagccgttgtctcagc

SEQ ID NO: 244 - DNA, 24 bp, Artificial Sequence
  Description of Artificial Sequence:  Hypothetical Probe Sequence
tcgttgcggcaatgatccatcacg

SEQ ID NO: 245 - DNA, 24 bp, Artificial Sequence
  Description of Artificial Sequence:  Hypothetical Probe Sequence
tcgttgcgtcccctcagtgcctca

SEQ ID NO: 246 - DNA, 24 bp, Artificial Sequence
  Description of Artificial Sequence:  Hypothetical Probe Sequence
tcgttgcgcacgtgatcgttccat

SEQ ID NO: 247 - DNA, 24 bp, Artificial Sequence
  Description of Artificial Sequence:  Hypothetical Probe Sequence
tcgttgcggtgctgatggacatcg

SEQ ID NO: 248 - DNA, 24 bp, Artificial Sequence
  Description of Artificial Sequence:  Hypothetical Probe Sequence
tcgtgaccgaccgatgtcccagga

SEQ ID NO: 249 - DNA, 24 bp, Artificial Sequence
  Description of Artificial Sequence:  Hypothetical Probe Sequence
tcgtgtgcgatggagtgtgcccat

SEQ ID NO: 250 - DNA, 24 bp, Artificial Sequence
  Description of Artificial Sequence:  Hypothetical Probe Sequence
tcgtgtgcgacctgatatcggtgc

SEQ ID NO: 251 - DNA, 24 bp, Artificial Sequence
  Description of Artificial Sequence:  Hypothetical Probe Sequence
tcgtggacaggagatggcttgtgc

SEQ ID NO: 252 - DNA, 24 bp, Artificial Sequence
  Description of Artificial Sequence:  Hypothetical Probe Sequence
tcgtacggtgatcacgcagcacgg

SEQ ID NO: 253 - DNA, 24 bp, Artificial Sequence
  Description of Artificial Sequence:  Hypothetical Probe Sequence
tcgtacggggacaaagcgttgtct

SEQ ID NO: 254 - DNA, 24 bp, Artificial Sequence
  Description of Artificial Sequence:  Hypothetical Probe Sequence
cttgtgtcgtgcacggctgttgcg

SEQ ID NO: 255 - DNA, 24 bp, Artificial Sequence
  Description of Artificial Sequence:  Hypothetical Probe Sequence
cttgtcgtccatagcctcccggta

SEQ ID NO: 256 - DNA, 24 bp, Artificial Sequence
  Description of Artificial Sequence:  Hypothetical Probe Sequence
cttgccatgtcttgcggcttacgg

SEQ ID NO: 257 - DNA, 24 bp, Artificial Sequence
  Description of Artificial Sequence:  Hypothetical Probe Sequence
cttggctttcgtccatcttggtgc

SEQ ID NO: 258 - DNA, 24 bp, Artificial Sequence
  Description of Artificial Sequence:  Hypothetical Probe Sequence
cttgaggagctttgcgccatgcaa

SEQ ID NO: 259 - DNA, 24 bp, Artificial Sequence
  Description of Artificial Sequence:  Hypothetical Probe Sequence
cttgtcccaaaggcttgcaatccc

SEQ ID NO: 260 - DNA, 24 bp, Artificial Sequence
  Description of Artificial Sequence:  Hypothetical Probe Sequence
cttgtgcgcttgaaagcgaatctg

SEQ ID NO: 261 - DNA, 24 bp, Artificial Sequence
  Description of Artificial Sequence:  Hypothetical Probe Sequence
cttgtgcggagttgtcagccggta

SEQ ID NO: 262 - DNA, 24 bp, Artificial Sequence
  Description of Artificial Sequence:  Hypothetical Probe Sequence
cttgcacgtgtctcccagccccat

SEQ ID NO: 263 - DNA, 24 bp, Artificial Sequence
  Description of Artificial Sequence:  Hypothetical Probe Sequence
cttgcacgctgtcgaattagcagc

SEQ ID NO: 264 - DNA, 24 bp, Artificial Sequence
  Description of Artificial Sequence:  Hypothetical Probe Sequence
cttgggacacctctgtgtgcgcaa

SEQ ID NO: 265 - DNA, 24 bp, Artificial Sequence
  Description of Artificial Sequence:  Hypothetical Probe Sequence
cttgacggagtgacggcgaacgaa

SEQ ID NO: 266 - DNA, 24 bp, Artificial Sequence
  Description of Artificial Sequence:  Hypothetical Probe Sequence
cttgagccaatctgcggcaaccat

SEQ ID NO: 267 - DNA, 24 bp, Artificial Sequence
  Description of Artificial Sequence:  Hypothetical Probe Sequence
cttgagccgtctcctaatcgagcc

SEQ ID NO: 268 - DNA, 24 bp, Artificial Sequence
  Description of Artificial Sequence:  Hypothetical Probe Sequence
cttgagccagtgaaagtgcgcacg

SEQ ID NO: 269 - DNA, 24 bp, Artificial Sequence
  Description of Artificial Sequence:  Hypothetical Probe Sequence
cgtttctgtcgttcccgtgcggac

SEQ ID NO: 270 - DNA, 24 bp, Artificial Sequence
  Description of Artificial Sequence:  Hypothetical Probe Sequence
cgtttcgtgtctggaccacgtccc

SEQ ID NO: 271 - DNA, 24 bp, Artificial Sequence
  Description of Artificial Sequence:  Hypothetical Probe Sequence
cgttgctttgcggatgtcgtacgg

SEQ ID NO: 272 - DNA, 24 bp, Artificial Sequence
  Description of Artificial Sequence:  Hypothetical Probe Sequence
cgttggtaaaagtcgttcccagcc

SEQ ID NO: 273 - DNA, 24 bp, Artificial Sequence
  Description of Artificial Sequence:  Hypothetical Probe Sequence
cgttggtacacgccatcagccacg

SEQ ID NO: 274 - DNA, 24 bp, Artificial Sequence
  Description of Artificial Sequence:  Hypothetical Probe Sequence
cgttcctacacgcttgtgcggacc

SEQ ID NO: 275 - DNA, 24 bp, Artificial Sequence
  Description of Artificial Sequence:  Hypothetical Probe Sequence
cgtttccccgttggtaaatcccat

SEQ ID NO: 276 - DNA, 24 bp, Artificial Sequence
  Description of Artificial Sequence:  Hypothetical Probe Sequence
cgtttcccccattgtcgagtcgtt

SEQ ID NO: 277 - DNA, 24 bp, Artificial Sequence
  Description of Artificial Sequence:  Hypothetical Probe Sequence
cgtttcccgtgctgcgagtgtgat

SEQ ID NO: 278 - DNA, 24 bp, Artificial Sequence
  Description of Artificial Sequence:  Hypothetical Probe Sequence
cgtttgcgttagagtgcacgatcg

SEQ ID NO: 279 - DNA, 24 bp, Artificial Sequence
  Description of Artificial Sequence:  Hypothetical Probe Sequence
cgttcacgcacgtgtcaaagtccc

SEQ ID NO: 280 - DNA, 24 bp, Artificial Sequence
  Description of Artificial Sequence:  Hypothetical Probe Sequence
cgttgacccttggcaatacaacgg

SEQ ID NO: 281 - DNA, 24 bp, Artificial Sequence
  Description of Artificial Sequence:  Hypothetical Probe Sequence
cgttgtgcacggcttgtgtccgtt

SEQ ID NO: 282 - DNA, 24 bp, Artificial Sequence
  Description of Artificial Sequence:  Hypothetical Probe Sequence
ctcaaaagtgcgtcgttgattgcg

SEQ ID NO: 283 - DNA, 24 bp, Artificial Sequence
  Description of Artificial Sequence:  Hypothetical Probe Sequence
ctcaaaaggacctctgcagccgtt

SEQ ID NO: 284 - DNA, 24 bp, Artificial Sequence
  Description of Artificial Sequence:  Hypothetical Probe Sequence
ctcatcgtgcaacgttgaccacgg

SEQ ID NO: 285 - DNA, 24 bp, Artificial Sequence
  Description of Artificial Sequence:  Hypothetical Probe Sequence
ctcatcccggacaggagtgcacct

SEQ ID NO: 286 - DNA, 24 bp, Artificial Sequence
  Description of Artificial Sequence:  Hypothetical Probe Sequence
ctgtgatgcagccgaaatcgcagc

SEQ ID NO: 287 - DNA, 24 bp, Artificial Sequence
  Description of Artificial Sequence:  Hypothetical Probe Sequence
ctgttccctgcgttgaggtatgcg

SEQ ID NO: 288 - DNA, 24 bp, Artificial Sequence
  Description of Artificial Sequence:  Hypothetical Probe Sequence
ctgttgcgacgggcaaccattgat

SEQ ID NO: 289 - DNA, 24 bp, Artificial Sequence
  Description of Artificial Sequence:  Hypothetical Probe Sequence
ctgtgaccccatcttgatcggcaa

SEQ ID NO: 290 - DNA, 24 bp, Artificial Sequence
  Description of Artificial Sequence:  Hypothetical Probe Sequence
ctgtgtgcatcggaccaccttgcg

SEQ ID NO: 291 - DNA, 24 bp, Artificial Sequence
  Description of Artificial Sequence:  Hypothetical Probe Sequence
ctgtgtgccacgatacggaccgtt

SEQ ID NO: 292 - DNA, 24 bp, Artificial Sequence
  Description of Artificial Sequence:  Hypothetical Probe Sequence
ctgtggaccctaccattcccagcc

SEQ ID NO: 293 - DNA, 24 bp, Artificial Sequence
  Description of Artificial Sequence:  Hypothetical Probe Sequence
ctgtggaccacggtgcgatgctca

SEQ ID NO: 294 - DNA, 24 bp, Artificial Sequence
  Description of Artificial Sequence:  Hypothetical Probe Sequence
ccattgtccagcttgaacggctgt

SEQ ID NO: 295 - DNA, 24 bp, Artificial Sequence
  Description of Artificial Sequence:  Hypothetical Probe Sequence
ccattcgttcgtcgttgcttatcg

SEQ ID NO: 296 - DNA, 24 bp, Artificial Sequence
  Description of Artificial Sequence:  Hypothetical Probe Sequence
ccattcgtgagtcacgtgcgcagc

SEQ ID NO: 297 - DNA, 24 bp, Artificial Sequence
  Description of Artificial Sequence:  Hypothetical Probe Sequence
ccattgcgatacggacatcggcaa

SEQ ID NO: 298 - DNA, 24 bp, Artificial Sequence
  Description of Artificial Sequence:  Hypothetical Probe Sequence
ccattgcgcgaagatgctcacagc

SEQ ID NO: 299 - DNA, 24 bp, Artificial Sequence
  Description of Artificial Sequence:  Hypothetical Probe Sequence Abramites sp.
ccatcacgaatcgcttgtgcgctt

SEQ ID NO: 300 - DNA, 24 bp, Artificial Sequence
  Description of Artificial Sequence:  Hypothetical Probe Sequence
ccatcagcagccaaaggtcttccc

SEQ ID NO: 301 - DNA, 24 bp, Artificial Sequence
  Description of Artificial Sequence:  Hypothetical Probe Sequence
cgaattgatcccaatccgaatccc

SEQ ID NO: 302 - DNA, 24 bp, Artificial Sequence
  Description of Artificial Sequence:  Hypothetical Probe Sequence
cgaattagcacgggtacagcacgg

SEQ ID NO: 303 - DNA, 24 bp, Artificial Sequence
  Description of Artificial Sequence:  Hypothetical Probe Sequence
cgaatgtctcccgtgcccatagcc

SEQ ID NO: 304 - DNA, 24 bp, Artificial Sequence
  Description of Artificial Sequence:  Hypothetical Probe Sequence
cgaatcgtaccttgcggtctcgtt

SEQ ID NO: 305 - DNA, 24 bp, Artificial Sequence
  Description of Artificial Sequence:  Hypothetical Probe Sequence
cgaatcgtcctaaggatcccagcc

SEQ ID NO: 306 - DNA, 24 bp, Artificial Sequence
  Description of Artificial Sequence:  Hypothetical Probe Sequence
cgaactcacgttcacgcgtttgcg

SEQ ID NO: 307 - DNA, 24 bp, Artificial Sequence
  Description of Artificial Sequence:  Hypothetical Probe Sequence
cgaaccattgatcttgcacgcgtt

SEQ ID NO: 308 - DNA, 24 bp, Artificial Sequence
  Description of Artificial Sequence:  Hypothetical Probe Sequence
cgaaccatcagcgaccgtctagcc

SEQ ID NO: 309 - DNA, 24 bp, Artificial Sequence
  Description of Artificial Sequence:  Hypothetical Probe Sequence
cgaagcttctgttccccgtttccc

SEQ ID NO: 310 - DNA, 24 bp, Artificial Sequence
  Description of Artificial Sequence:  Hypothetical Probe Sequence
cgaaatcgaccttctggatgcagc

SEQ ID NO: 311 - DNA, 24 bp, Artificial Sequence
  Description of Artificial Sequence:  Hypothetical Probe Sequence
cgaaatcgacgggagttgtctgcg

SEQ ID NO: 312 - DNA, 24 bp, Artificial Sequence
  Description of Artificial Sequence:  Hypothetical Probe Sequence
cgaatgcggcttcgttaaagcttg

SEQ ID NO: 313 - DNA, 24 bp, Artificial Sequence
  Description of Artificial Sequence:  Hypothetical Probe Sequence
cgaatgcgggtaatactgcgtcgt

SEQ ID NO: 314 - DNA, 24 bp, Artificial Sequence
  Description of Artificial Sequence:  Hypothetical Probe Sequence
cgaaggacgtgcacctcctacgaa

SEQ ID NO: 315 - DNA, 24 bp, Artificial Sequence
  Description of Artificial Sequence:  Hypothetical Probe Sequence
cgaaacggttagctgtcagcacgg

SEQ ID NO: 316 - DNA, 24 bp, Artificial Sequence
  Description of Artificial Sequence:  Hypothetical Probe Sequence
cgaaacggagccgtctcgttgctt

SEQ ID NO: 317 - DNA, 24 bp, Artificial Sequence
  Description of Artificial Sequence:  Hypothetical Probe Sequence
cgaaagccgcaaagtgaatcgtgc

SEQ ID NO: 318 - DNA, 24 bp, Artificial Sequence
  Description of Artificial Sequence:  Hypothetical Probe Sequence
gctttcgtcgaagtctcacgccat

SEQ ID NO: 319 - DNA, 24 bp, Artificial Sequence
  Description of Artificial Sequence:  Hypothetical Probe Sequence
gcttcttgacggagccttgacacg

SEQ ID NO: 320 - DNA, 24 bp, Artificial Sequence
  Description of Artificial Sequence:  Hypothetical Probe Sequence
gtctcttgcgtttgcgcctagcaa

SEQ ID NO: 321 - DNA, 24 bp, Artificial Sequence
  Description of Artificial Sequence:  Hypothetical Probe Sequence
gtctgtgcggaccctaacggctca

SEQ ID NO: 322 - DNA, 24 bp, Artificial Sequence
  Description of Artificial Sequence:  Hypothetical Probe Sequence
gagtgacccagctgtcggaccacg

SEQ ID NO: 323 - DNA, 24 bp, Artificial Sequence
  Description of Artificial Sequence:  Hypothetical Probe Sequence
gagtgtgccttgtgcgcgaacgtt

SEQ ID NO: 324 - DNA, 24 bp, Artificial Sequence
  Description of Artificial Sequence:  Hypothetical Probe Sequence
gcaatacatcccggacacgggcaa

SEQ ID NO: 325 - DNA, 24 bp, Artificial Sequence
  Description of Artificial Sequence:  Hypothetical Probe Sequence
gcaatcgtgatggtcttgcgtccc

SEQ ID NO: 326 - DNA, 24 bp, Artificial Sequence
  Description of Artificial Sequence:  Hypothetical Probe Sequence
gcaacgttggaccttgctgttccc

SEQ ID NO: 327 - DNA, 24 bp, Artificial Sequence
  Description of Artificial Sequence:  Hypothetical Probe Sequence
gcaactcaacctccattcgttccc

SEQ ID NO: 328 - DNA, 24 bp, Artificial Sequence
  Description of Artificial Sequence:  Hypothetical Probe Sequence
gcaactcatgcgcacgtctggtgc

SEQ ID NO: 329 - DNA, 24 bp, Artificial Sequence
  Description of Artificial Sequence:  Hypothetical Probe Sequence
gcaagcaattagcacgccatcgaa

SEQ ID NO: 330 - DNA, 24 bp, Artificial Sequence
  Description of Artificial Sequence:  Hypothetical Probe Sequence
gcaaagtgtcgtttgatgcgggac

SEQ ID NO: 331 - DNA, 24 bp, Artificial Sequence
  Description of Artificial Sequence:  Hypothetical Probe Sequence
gcaaacctctcatgcgtgattgcg

SEQ ID NO: 332 - DNA, 24 bp, Artificial Sequence
  Description of Artificial Sequence:  Hypothetical Probe Sequence
gcaaatcgatcgcgaacgaaggac

SEQ ID NO: 333 - DNA, 24 bp, Artificial Sequence
  Description of Artificial Sequence:  Hypothetical Probe Sequence
gcaaatcgagccaatcggtaacct

SEQ ID NO: 334 - DNA, 24 bp, Artificial Sequence
  Description of Artificial Sequence:  Hypothetical Probe Sequence
gcaaggacgtcttgtccgttcacg

SEQ ID NO: 335 - DNA, 24 bp, Artificial Sequence
  Description of Artificial Sequence:  Hypothetical Probe Sequence
gcaaagcccgttcagcaccttctg

SEQ ID NO: 336 - DNA, 24 bp, Artificial Sequence
  Description of Artificial Sequence:  Hypothetical Probe Sequence
agtgcgaacttgtctgggactgcg

SEQ ID NO: 337 - DNA, 24 bp, Artificial Sequence
  Description of Artificial Sequence:  Hypothetical Probe Sequence
acctttagcgtttgtctgcgtccc

SEQ ID NO: 338 - DNA, 24 bp, Artificial Sequence
  Description of Artificial Sequence:  Hypothetical Probe Sequence
acctcgaaccattacatgcggctt

SEQ ID NO: 339 - DNA, 24 bp, Artificial Sequence
  Description of Artificial Sequence:  Hypothetical Probe Sequence
acctgcttcgaagtgcctgtcagc

SEQ ID NO: 340 - DNA, 24 bp, Artificial Sequence
  Description of Artificial Sequence:  Hypothetical Probe Sequence
acctgtgcttgacacgatcgcacg

SEQ ID NO: 341 - DNA, 24 bp, Artificial Sequence
  Description of Artificial Sequence:  Hypothetical Probe Sequence
atcgaaagctcagtgcgcaagctt

SEQ ID NO: 342 - DNA, 24 bp, Artificial Sequence
  Description of Artificial Sequence:  Hypothetical Probe Sequence
atcgcttgtgtctgcgagcctctg

SEQ ID NO: 343 - DNA, 24 bp, Artificial Sequence
  Description of Artificial Sequence:  Hypothetical Probe Sequence
atcgcttgcgaaaaagctgtccat

SEQ ID NO: 344 - DNA, 24 bp, Artificial Sequence
  Description of Artificial Sequence:  Hypothetical Probe Sequence
atcgcgttgagtaggaggacggac

SEQ ID NO: 345 - DNA, 24 bp, Artificial Sequence
  Description of Artificial Sequence:  Hypothetical Probe Sequence
atcgctcatctggtgcggacgcaa

SEQ ID NO: 346 - DNA, 24 bp, Artificial Sequence
  Description of Artificial Sequence:  Hypothetical Probe Sequence
atcgctgtgatgcgttacggcacg

SEQ ID NO: 347 - DNA, 24 bp, Artificial Sequence
  Description of Artificial Sequence:  Hypothetical Probe Sequence
atcgccataatccagccagcacct

SEQ ID NO: 348 - DNA, 24 bp, Artificial Sequence
  Description of Artificial Sequence:  Hypothetical Probe Sequence
atcggcttcagcaaagtctgccat

SEQ ID NO: 349 - DNA, 24 bp, Artificial Sequence
  Description of Artificial Sequence:  Hypothetical Probe Sequence
atcggagtggaccacgcttgggac

SEQ ID NO: 350 - DNA, 24 bp, Artificial Sequence
  Description of Artificial Sequence:  Hypothetical Probe Sequence
atcgagtgctcaaggaatcggcaa

SEQ ID NO: 351 - DNA, 24 bp, Artificial Sequence
  Description of Artificial Sequence:  Hypothetical Probe Sequence
atcgcctagatgtgcgaggatccc

SEQ ID NO: 352 - DNA, 24 bp, Artificial Sequence
  Description of Artificial Sequence:  Hypothetical Probe Sequence
atcgtcccagccctgtgatggtgc

SEQ ID NO: 353 - DNA, 24 bp, Artificial Sequence
  Description of Artificial Sequence:  Hypothetical Probe Sequence
atcgggactacaatcgcagcgatg

SEQ ID NO: 354 - DNA, 24 bp, Artificial Sequence
  Description of Artificial Sequence:  Hypothetical Probe Sequence
atcgacggtgtccgaaccatgcaa

SEQ ID NO: 355 - DNA, 24 bp, Artificial Sequence
  Description of Artificial Sequence:  Hypothetical Probe Sequence
atcgagccgagtttgacgaacacg

SEQ ID NO: 356 - DNA, 24 bp, Artificial Sequence
  Description of Artificial Sequence:  Hypothetical Probe Sequence
aggatcgtgaccaggacagcacgg

SEQ ID NO: 357 - DNA, 24 bp, Artificial Sequence
  Description of Artificial Sequence:  Hypothetical Probe Sequence
aggagcttgatgtcccgcaatccc

SEQ ID NO: 358 - DNA, 24 bp, Artificial Sequence
  Description of Artificial Sequence:  Hypothetical Probe Sequence
aggaagtgggtagcaatccccacg

SEQ ID NO: 359 - DNA, 24 bp, Artificial Sequence
  Description of Artificial Sequence:  Hypothetical Probe Sequence
aggagtgcgtgccttggaccacct

SEQ ID NO: 360 - DNA, 24 bp, Artificial Sequence
  Description of Artificial Sequence:  Hypothetical Probe Sequence
cctacagcaggagaccgaccgcaa

SEQ ID NO: 361 - DNA, 24 bp, Artificial Sequence
  Description of Artificial Sequence:  Hypothetical Probe Sequence
gatgccatgcaacagcaggacagc

SEQ ID NO: 362 - DNA, 24 bp, Artificial Sequence
  Description of Artificial Sequence:  Hypothetical Probe Sequence
gatgggaccttgcacgtcgtcgaa

SEQ ID NO: 363 - DNA, 24 bp, Artificial Sequence
  Description of Artificial Sequence:  Hypothetical Probe Sequence
tccctgattccccgaacgttgatg

SEQ ID NO: 364 - DNA, 24 bp, Artificial Sequence
  Description of Artificial Sequence:  Hypothetical Probe Sequence
tccctacatgcgttaggacccacg

SEQ ID NO: 365 - DNA, 24 bp, Artificial Sequence
  Description of Artificial Sequence:  Hypothetical Probe Sequence
tccctctggatgcacgaatcgtgc

SEQ ID NO: 366 - DNA, 24 bp, Artificial Sequence
  Description of Artificial Sequence:  Hypothetical Probe Sequence
tccccttgtgcgatcgctgtctca

SEQ ID NO: 367 - DNA, 24 bp, Artificial Sequence
  Description of Artificial Sequence:  Hypothetical Probe Sequence
tccccgttacggagtggtctgcaa

SEQ ID NO: 368 - DNA, 24 bp, Artificial Sequence
  Description of Artificial Sequence:  Hypothetical Probe Sequence
tcccctcatacaacggccatgcaa

SEQ ID NO: 369 - DNA, 24 bp, Artificial Sequence
  Description of Artificial Sequence:  Hypothetical Probe Sequence
tcccctcactgtcctatcccagcc

SEQ ID NO: 370 - DNA, 24 bp, Artificial Sequence
  Description of Artificial Sequence:  Hypothetical Probe Sequence
tcccctcacctaatacacggcgtt

SEQ ID NO: 371 - DNA, 24 bp, Artificial Sequence
  Description of Artificial Sequence:  Hypothetical Probe Sequence
tcccccatatacgcaacagcagcc

SEQ ID NO: 372 - DNA, 24 bp, Artificial Sequence
  Description of Artificial Sequence:  Hypothetical Probe Sequence
tccccgaatgatgcttcgttttga

SEQ ID NO: 373 - DNA, 24 bp, Artificial Sequence
  Description of Artificial Sequence:  Hypothetical Probe Sequence
tcccggtagaccccatgaccacct

SEQ ID NO: 374 - DNA, 24 bp, Artificial Sequence
  Description of Artificial Sequence:  Hypothetical Probe Sequence
tcccgtctctgtgatgagcccgtt

SEQ ID NO: 375 - DNA, 24 bp, Artificial Sequence
  Description of Artificial Sequence:  Hypothetical Probe Sequence
tcccgagttgtcgaccccattgcg

SEQ ID NO: 376 - DNA, 24 bp, Artificial Sequence
  Description of Artificial Sequence:  Hypothetical Probe Sequence
tcccgcaaaggagagtgatgcgaa

SEQ ID NO: 377 - DNA, 24 bp, Artificial Sequence
  Description of Artificial Sequence:  Hypothetical Probe Sequence
tcccatcgtgtctgatagccagcc

SEQ ID NO: 378 - DNA, 24 bp, Artificial Sequence
  Description of Artificial Sequence:  Hypothetical Probe Sequence
tcccaggactgtttgacacggcaa

SEQ ID NO: 379 - DNA, 24 bp, Artificial Sequence
  Description of Artificial Sequence:  Hypothetical Probe Sequence
tccccacgtacaggacaatcagcc

SEQ ID NO: 380 - DNA, 24 bp, Artificial Sequence
  Description of Artificial Sequence:  Hypothetical Probe Sequence
tccccacggcttcttgacctcgaa

SEQ ID NO: 381 - DNA, 24 bp, Artificial Sequence
  Description of Artificial Sequence:  Hypothetical Probe Sequence
tcccgaccgcttggtaccatgtgc

SEQ ID NO: 382 - DNA, 24 bp, Artificial Sequence
  Description of Artificial Sequence:  Hypothetical Probe Sequence
tcccggactgatcgttgatgcttg

SEQ ID NO: 383 - DNA, 24 bp, Artificial Sequence
  Description of Artificial Sequence:  Hypothetical Probe Sequence
tcccggacttagcgaacttgtccc

SEQ ID NO: 384 - DNA, 24 bp, Artificial Sequence
  Description of Artificial Sequence:  Hypothetical Probe Sequence
tcccacggcgaatgtccctacgtt

SEQ ID NO: 385 - DNA, 24 bp, Artificial Sequence
  Description of Artificial Sequence:  Hypothetical Probe Sequence
tcccacggtcccgagtggtaacgg

SEQ ID NO: 386 - DNA, 24 bp, Artificial Sequence
  Description of Artificial Sequence:  Hypothetical Probe Sequence
tcccagcctacatgtcacgggatg

SEQ ID NO: 387 - DNA, 24 bp, Artificial Sequence
  Description of Artificial Sequence:  Hypothetical Probe Sequence
tcccagccgatggatgatcgggta

SEQ ID NO: 388 - DNA, 24 bp, Artificial Sequence
  Description of Artificial Sequence:  Hypothetical Probe Sequence
tgcgttgacttgagtgacggcacg

SEQ ID NO: 389 - DNA, 24 bp, Artificial Sequence
  Description of Artificial Sequence:  Hypothetical Probe Sequence
tgcgttgaacctacggggactgat

SEQ ID NO: 390 - DNA, 24 bp, Artificial Sequence
  Description of Artificial Sequence:  Hypothetical Probe Sequence
tgcgtgatcgttctcacagccgaa

SEQ ID NO: 391 - DNA, 24 bp, Artificial Sequence
  Description of Artificial Sequence:  Hypothetical Probe Sequence
tgcgtgatgtctcacgcgaacagc

SEQ ID NO: 392 - DNA, 24 bp, Artificial Sequence
  Description of Artificial Sequence:  Hypothetical Probe Sequence
tgcgtgatgatgtgtccgaagtgc

SEQ ID NO: 393 - DNA, 24 bp, Artificial Sequence
  Description of Artificial Sequence:  Hypothetical Probe Sequence
tgcgaatcctgttgtccagcgtct

SEQ ID NO: 394 - DNA, 24 bp, Artificial Sequence
  Description of Artificial Sequence:  Hypothetical Probe Sequence
tgcgatacgtctgagtagcccgaa

SEQ ID NO: 395 - DNA, 24 bp, Artificial Sequence
  Description of Artificial Sequence:  Hypothetical Probe Sequence
tgcgaaagtgatagccagtggcaa

SEQ ID NO: 396 - DNA, 24 bp, Artificial Sequence
  Description of Artificial Sequence:  Hypothetical Probe Sequence
tgcgaaaggtgcaggagagttccc

SEQ ID NO: 397 - DNA, 24 bp, Artificial Sequence
  Description of Artificial Sequence:  Hypothetical Probe Sequence
tgcgtacatcgtacggctcacacg

SEQ ID NO: 398 - DNA, 24 bp, Artificial Sequence
  Description of Artificial Sequence:  Hypothetical Probe Sequence
tgcgtacaggactgcgaaagtgcg

SEQ ID NO: 399 - DNA, 24 bp, Artificial Sequence
  Description of Artificial Sequence:  Hypothetical Probe Sequence
tgcgtcgtggtacctatgtcgctt

SEQ ID NO: 400 - DNA, 24 bp, Artificial Sequence
  Description of Artificial Sequence:  Hypothetical Probe Sequence
tgcgcgttcctaaaagccatctgt

SEQ ID NO: 401 - DNA, 24 bp, Artificial Sequence
  Description of Artificial Sequence:  Hypothetical Probe Sequence
tgcgctcactcagaccaaaggcaa

SEQ ID NO: 402 - DNA, 24 bp, Artificial Sequence
  Description of Artificial Sequence:  Hypothetical Probe Sequence
tgcgctcacgaaccatcgttttga

SEQ ID NO: 403 - DNA, 24 bp, Artificial Sequence
  Description of Artificial Sequence:  Hypothetical Probe Sequence
tgcgctcagagtttagcacgacgg

SEQ ID NO: 404 - DNA, 24 bp, Artificial Sequence
  Description of Artificial Sequence:  Hypothetical Probe Sequence
tgcgctcaagccaggagcttggta

SEQ ID NO: 405 - DNA, 24 bp, Artificial Sequence
  Description of Artificial Sequence:  Hypothetical Probe Sequence
tgcgctgtttgagtgctcgtatcg

SEQ ID NO: 406 - DNA, 24 bp, Artificial Sequence
  Description of Artificial Sequence:  Hypothetical Probe Sequence
tgcgctgtcgttaggatctgtccc

SEQ ID NO: 407 - DNA, 24 bp, Artificial Sequence
  Description of Artificial Sequence:  Hypothetical Probe Sequence
tgcgctgtgagtctgtcgaaagcc

SEQ ID NO: 408 - DNA, 24 bp, Artificial Sequence
  Description of Artificial Sequence:  Hypothetical Probe Sequence
tgcgccatctgtagcctgatcagc

SEQ ID NO: 409 - DNA, 24 bp, Artificial Sequence
  Description of Artificial Sequence:  Hypothetical Probe Sequence
tgcgcgaagaccacctctgtacgg

SEQ ID NO: 410 - DNA, 24 bp, Artificial Sequence
  Description of Artificial Sequence:  Hypothetical Probe Sequence
tgcgcgaaggacgcaattagtccc

SEQ ID NO: 411 - DNA, 24 bp, Artificial Sequence
  Description of Artificial Sequence:  Hypothetical Probe Sequence
tgcggcttaatcctcagcaacgaa

SEQ ID NO: 412 - DNA, 24 bp, Artificial Sequence
  Description of Artificial Sequence:  Hypothetical Probe Sequence
tgcgggtatctgctgtgacccagc

SEQ ID NO: 413 - DNA, 24 bp, Artificial Sequence
  Description of Artificial Sequence:  Hypothetical Probe Sequence
tgcgggtagatgcctagaccgacc

SEQ ID NO: 414 - DNA, 24 bp, Artificial Sequence
  Description of Artificial Sequence:  Hypothetical Probe Sequence
tgcggagtgagtgcttcagcacgg

SEQ ID NO: 415 - DNA, 24 bp, Artificial Sequence
  Description of Artificial Sequence:  Hypothetical Probe Sequence
tgcggagttgcgagtgcgaactgt

SEQ ID NO: 416 - DNA, 24 bp, Artificial Sequence
  Description of Artificial Sequence:  Hypothetical Probe Sequence
tgcggagtcacgtccctacaagcc

SEQ ID NO: 417 - DNA, 24 bp, Artificial Sequence
  Description of Artificial Sequence:  Hypothetical Probe Sequence
tgcgagtgaatcggacggacgtgc

SEQ ID NO: 418 - DNA, 24 bp, Artificial Sequence
  Description of Artificial Sequence:  Hypothetical Probe Sequence
tgcgaccttctgtacagtgctgcg

SEQ ID NO: 419 - DNA, 24 bp, Artificial Sequence
  Description of Artificial Sequence:  Hypothetical Probe Sequence
tgcgatcggtgcgagtttgaagcc

SEQ ID NO: 420 - DNA, 24 bp, Artificial Sequence
  Description of Artificial Sequence:  Hypothetical Probe Sequence
tgcgcctattagagccgtgcctgt

SEQ ID NO: 421 - DNA, 24 bp, Artificial Sequence
  Description of Artificial Sequence:  Hypothetical Probe Sequence
tgcgcctaaatcctgtcttgcgaa

SEQ ID NO: 422 - DNA, 24 bp, Artificial Sequence
  Description of Artificial Sequence:  Hypothetical Probe Sequence
tgcgcctaagtgcgaaacctttga

SEQ ID NO: 423 - DNA, 24 bp, Artificial Sequence
  Description of Artificial Sequence:  Hypothetical Probe Sequence
tgcggatgaggattgatcgttcgt

SEQ ID NO: 424 - DNA, 24 bp, Artificial Sequence
  Description of Artificial Sequence:  Hypothetical Probe Sequence
tgcgtcccatactgatgtgccacg

SEQ ID NO: 425 - DNA, 24 bp, Artificial Sequence
  Description of Artificial Sequence:  Hypothetical Probe Sequence
tgcgtcccaggagtgcttagagcc

SEQ ID NO: 426 - DNA, 24 bp, Artificial Sequence
  Description of Artificial Sequence:  Hypothetical Probe Sequence
tgcggaccttagctcaccattccc

SEQ ID NO: 427 - DNA, 24 bp, Artificial Sequence
  Description of Artificial Sequence:  Hypothetical Probe Sequence
tgcggtgcagtgggtatctggctt

SEQ ID NO: 428 - DNA, 24 bp, Artificial Sequence
  Description of Artificial Sequence:  Hypothetical Probe Sequence
tgcgggacggtaacggtgatccta

SEQ ID NO: 429 - DNA, 24 bp, Artificial Sequence
  Description of Artificial Sequence:  Hypothetical Probe Sequence
tgcgacggaaagggtatgtcacgg

SEQ ID NO: 430 - DNA, 24 bp, Artificial Sequence
  Description of Artificial Sequence:  Hypothetical Probe Sequence
tgcgagccctgtttaggatgtccc

SEQ ID NO: 431 - DNA, 24 bp, Artificial Sequence
  Description of Artificial Sequence:  Hypothetical Probe Sequence
cacggagtgatgagcccttgcgaa

SEQ ID NO: 432 - DNA, 24 bp, Artificial Sequence
  Description of Artificial Sequence:  Hypothetical Probe Sequence
cacggcaaatactctggagttgcg

SEQ ID NO: 433 - DNA, 24 bp, Artificial Sequence
  Description of Artificial Sequence:  Hypothetical Probe Sequence
cacgatcggcaaatcgtcgtcttg

SEQ ID NO: 434 - DNA, 24 bp, Artificial Sequence
  Description of Artificial Sequence:  Hypothetical Probe Sequence
cacgaggaagtggcaacacgcagc

SEQ ID NO: 435 - DNA, 24 bp, Artificial Sequence
  Description of Artificial Sequence:  Hypothetical Probe Sequence
cacgaggagaccctcacgaatgcg

SEQ ID NO: 436 - DNA, 24 bp, Artificial Sequence
  Description of Artificial Sequence:  Hypothetical Probe Sequence
cacgcagcgcttgctttctgagga

SEQ ID NO: 437 - DNA, 24 bp, Artificial Sequence
  Description of Artificial Sequence:  Hypothetical Probe Sequence
cacgagccggtacgttggtaggac

SEQ ID NO: 438 - DNA, 24 bp, Artificial Sequence
  Description of Artificial Sequence:  Hypothetical Probe Sequence
cagcatacgtgctcccaggagcaa

SEQ ID NO: 439 - DNA, 24 bp, Artificial Sequence
  Description of Artificial Sequence:  Hypothetical Probe Sequence
cagcgagtccatggacagtgcgaa

SEQ ID NO: 440 - DNA, 24 bp, Artificial Sequence
  Description of Artificial Sequence:  Hypothetical Probe Sequence
cagcgagtggtaatcgtcccctca

SEQ ID NO: 441 - DNA, 24 bp, Artificial Sequence
  Description of Artificial Sequence:  Hypothetical Probe Sequence
cagcagtgatcgcttgagcctgcg

SEQ ID NO: 442 - DNA, 24 bp, Artificial Sequence
  Description of Artificial Sequence:  Hypothetical Probe Sequence
cagccagcaaagcctaaggagcaa

SEQ ID NO: 443 - DNA, 24 bp, Artificial Sequence
  Description of Artificial Sequence:  Hypothetical Probe Sequence
cagccagctacaagccaggacgaa

SEQ ID NO: 444 - DNA, 24 bp, Artificial Sequence
  Description of Artificial Sequence:  Hypothetical Probe Sequence
gaccgcaaacctgtctatcgcgaa

SEQ ID NO: 445 - DNA, 24 bp, Artificial Sequence
  Description of Artificial Sequence:  Hypothetical Probe Sequence
gaccgatgcgaatacagacccgaa

SEQ ID NO: 446 - DNA, 24 bp, Artificial Sequence
  Description of Artificial Sequence:  Hypothetical Probe Sequence
gaccgatggagtgatggaccacgg

SEQ ID NO: 447 - DNA, 24 bp, Artificial Sequence
  Description of Artificial Sequence:  Hypothetical Probe Sequence
gacctcccgcaagtctggaccgaa

SEQ ID NO: 448 - DNA, 24 bp, Artificial Sequence
  Description of Artificial Sequence:  Hypothetical Probe Sequence
gtgcgcttcctaacgggatgaaag

SEQ ID NO: 449 - DNA, 24 bp, Artificial Sequence
  Description of Artificial Sequence:  Hypothetical Probe Sequence
gtgcgcaacgttgcttttagcgtt

SEQ ID NO: 450 - DNA, 24 bp, Artificial Sequence
  Description of Artificial Sequence:  Hypothetical Probe Sequence
gtgcaggacctaagccatcgacgg

SEQ ID NO: 451 - DNA, 24 bp, Artificial Sequence
  Description of Artificial Sequence:  Hypothetical Probe Sequence
ggaccttgaggatgtcgatggcaa

SEQ ID NO: 452 - DNA, 24 bp, Artificial Sequence
  Description of Artificial Sequence:  Hypothetical Probe Sequence
ggaccagccgttttgagatgccat

SEQ ID NO: 453 - DNA, 24 bp, Artificial Sequence
  Description of Artificial Sequence:  Hypothetical Probe Sequence
acggttgattgaatcgcgtttgcg

SEQ ID NO: 454 - DNA, 24 bp, Artificial Sequence
  Description of Artificial Sequence:  Hypothetical Probe Sequence
acggctcaggacatacccattgcg

SEQ ID NO: 455 - DNA, 24 bp, Artificial Sequence
  Description of Artificial Sequence:  Hypothetical Probe Sequence
acggctgtggtactcatcgttccc

SEQ ID NO: 456 - DNA, 24 bp, Artificial Sequence
  Description of Artificial Sequence:  Hypothetical Probe Sequence
acggagtggcttgtctgaccagcc

SEQ ID NO: 457 - DNA, 24 bp, Artificial Sequence
  Description of Artificial Sequence:  Hypothetical Probe Sequence
acggatcgtctgtctggacccgaa

SEQ ID NO: 458 - DNA, 24 bp, Artificial Sequence
  Description of Artificial Sequence:  Hypothetical Probe Sequence
acggaggatgatacctcacggtgc

SEQ ID NO: 459 - DNA, 24 bp, Artificial Sequence
  Description of Artificial Sequence:  Hypothetical Probe Sequence
agccttagccattctgcgaacgaa

SEQ ID NO: 460 - DNA, 24 bp, Artificial Sequence
  Description of Artificial Sequence:  Hypothetical Probe Sequence
agcctgtcgcaaataccgttcgtt

SEQ ID NO: 461 - DNA, 24 bp, Artificial Sequence
  Description of Artificial Sequence:  Hypothetical Probe Sequence
agcctcgtttagtcgttgcggtct

SEQ ID NO: 462 - DNA, 24 bp, Artificial Sequence
  Description of Artificial Sequence:  Hypothetical Probe Sequence
agccgtctggactgattctgcacg

SEQ ID NO: 463 - DNA, 24 bp, Artificial Sequence
  Description of Artificial Sequence:  Hypothetical Probe Sequence
agccgagtttagcctacacgtgcg

SEQ ID NO: 464 - DNA, 24 bp, Artificial Sequence
  Description of Artificial Sequence:  Hypothetical Probe Sequence
agcctgcgtacactgtccattccc

SEQ ID NO: 465 - DNA, 24 bp, Artificial Sequence
  Description of Artificial Sequence:  Hypothetical Probe Sequence
agccgaccagccttagggacgagt

SEQ ID NO: 466 - DNA, 24 bp, Artificial Sequence
  Description of Artificial Sequence:  Hypothetical Probe Sequence
ttgattgaagccatcggctttccc

SEQ ID NO: 467 - DNA, 24 bp, Artificial Sequence
  Description of Artificial Sequence:  Hypothetical Probe Sequence
ttgaaatccacgtccccgaaacgg

SEQ ID NO: 468 - DNA, 24 bp, Artificial Sequence
  Description of Artificial Sequence:  Hypothetical Probe Sequence
ttgaaaagcgttctcatgcgcgtt

SEQ ID NO: 469 - DNA, 24 bp, Artificial Sequence
  Description of Artificial Sequence:  Hypothetical Probe Sequence
ttgatcgtcagccacgacggacgg

SEQ ID NO: 470 - DNA, 24 bp, Artificial Sequence
  Description of Artificial Sequence:  Hypothetical Probe Sequence
ttgatcgtgtgcacggtgcgatcg

SEQ ID NO: 471 - DNA, 24 bp, Artificial Sequence
  Description of Artificial Sequence:  Hypothetical Probe Sequence
ttgacttgcgaagtgcgtgccgtt

SEQ ID NO: 472 - DNA, 24 bp, Artificial Sequence
  Description of Artificial Sequence:  Hypothetical Probe Sequence
ttgacgtttccccacgagtgcgtt

SEQ ID NO: 473 - DNA, 24 bp, Artificial Sequence
  Description of Artificial Sequence:  Hypothetical Probe Sequence
ttgaccatgtgcacggcacgccat

SEQ ID NO: 474 - DNA, 24 bp, Artificial Sequence
  Description of Artificial Sequence:  Hypothetical Probe Sequence
ttgacgaaacggctcacagccacg

SEQ ID NO: 475 - DNA, 24 bp, Artificial Sequence
  Description of Artificial Sequence:  Hypothetical Probe Sequence
ttgagctttcccggtatcccggac

SEQ ID NO: 476 - DNA, 24 bp, Artificial Sequence
  Description of Artificial Sequence:  Hypothetical Probe Sequence
ttgaagtgcgaaatcggtgcacct

SEQ ID NO: 477 - DNA, 24 bp, Artificial Sequence
  Description of Artificial Sequence:  Hypothetical Probe Sequence
ttgaacctcagccacgagccagga

SEQ ID NO: 478 - DNA, 24 bp, Artificial Sequence
  Description of Artificial Sequence:  Hypothetical Probe Sequence
ttgaacctagcctgcgtcccgacc

SEQ ID NO: 479 - DNA, 24 bp, Artificial Sequence
  Description of Artificial Sequence:  Hypothetical Probe Sequence
ttgatcccaaaggcaaagccatcg

SEQ ID NO: 480 - DNA, 24 bp, Artificial Sequence
  Description of Artificial Sequence:  Hypothetical Probe Sequence
ttgatccctccccctacacgcgtt

SEQ ID NO: 481 - DNA, 24 bp, Artificial Sequence
  Description of Artificial Sequence:  Hypothetical Probe Sequence
ttgatgcgttgacagcggacgcaa

SEQ ID NO: 482 - DNA, 24 bp, Artificial Sequence
  Description of Artificial Sequence:  Hypothetical Probe Sequence
ttgatgcgcgaacctagatgcacg

SEQ ID NO: 483 - DNA, 24 bp, Artificial Sequence
  Description of Artificial Sequence:  Hypothetical Probe Sequence
ttgatgcgggtattagcacggacc

SEQ ID NO: 484 - DNA, 24 bp, Artificial Sequence
  Description of Artificial Sequence:  Hypothetical Probe Sequence
ttgatgcgagtgacgggtgctccc

SEQ ID NO: 485 - DNA, 24 bp, Artificial Sequence
  Description of Artificial Sequence:  Hypothetical Probe Sequence
ttgatgcgcctatctgacggcttg

SEQ ID NO: 486 - DNA, 24 bp, Artificial Sequence
  Description of Artificial Sequence:  Hypothetical Probe Sequence
ttgatgcggatgcagctacatgcg

SEQ ID NO: 487 - DNA, 24 bp, Artificial Sequence
  Description of Artificial Sequence:  Hypothetical Probe Sequence
ttgacacgcttgcacgatcggtgc

SEQ ID NO: 488 - DNA, 24 bp, Artificial Sequence
  Description of Artificial Sequence:  Hypothetical Probe Sequence
ttgacacggtgcccatctgttgcg

SEQ ID NO: 489 - DNA, 24 bp, Artificial Sequence
  Description of Artificial Sequence:  Hypothetical Probe Sequence
ttgacacgacggaaaggcaaatcg

SEQ ID NO: 490 - DNA, 24 bp, Artificial Sequence
  Description of Artificial Sequence:  Hypothetical Probe Sequence
ttgacagcagccagtggtgctccc

SEQ ID NO: 491 - DNA, 24 bp, Artificial Sequence
  Description of Artificial Sequence:  Hypothetical Probe Sequence
ttgagacctgcgcagccgaaggta

SEQ ID NO: 492 - DNA, 24 bp, Artificial Sequence
  Description of Artificial Sequence:  Hypothetical Probe Sequence
ttgaggacacggtccctgtctgcg

SEQ ID NO: 493 - DNA, 24 bp, Artificial Sequence
  Description of Artificial Sequence:  Hypothetical Probe Sequence
ttgaacggcttgcttgccatatcg

SEQ ID NO: 494 - DNA, 24 bp, Artificial Sequence
  Description of Artificial Sequence:  Hypothetical Probe Sequence
ttgaacgggagtacggcacgcttg

SEQ ID NO: 495 - DNA, 24 bp, Artificial Sequence
  Description of Artificial Sequence:  Hypothetical Probe Sequence
ttgaagcccttgaggaacggggta

SEQ ID NO: 496 - DNA, 24 bp, Artificial Sequence
  Description of Artificial Sequence:  Hypothetical Probe Sequence
tgatttgaagccctcaagccgcaa

SEQ ID NO: 497 - DNA, 24 bp, Artificial Sequence
  Description of Artificial Sequence:  Hypothetical Probe Sequence
tgattgattgcggcaacttgcacg

SEQ ID NO: 498 - DNA, 24 bp, Artificial Sequence
  Description of Artificial Sequence:  Hypothetical Probe Sequence
tgattctgccatggacacgggtgc

SEQ ID NO: 499 - DNA, 24 bp, Artificial Sequence
  Description of Artificial Sequence:  Hypothetical Probe Sequence
tgattctgcagcaggaccattgcg

SEQ ID NO: 500 - DNA, 24 bp, Artificial Sequence
  Description of Artificial Sequence:  Hypothetical Probe Sequence
tgattcgtcagccagcgtgcgatg

SEQ ID NO: 501 - DNA, 24 bp, Artificial Sequence
  Description of Artificial Sequence:  Hypothetical Probe Sequence
tgatcttgccattcccggaccagc

SEQ ID NO: 502 - DNA, 24 bp, Artificial Sequence
  Description of Artificial Sequence:  Hypothetical Probe Sequence
tgatcgaagcttagcccctatgcg

SEQ ID NO: 503 - DNA, 24 bp, Artificial Sequence
  Description of Artificial Sequence:  Hypothetical Probe Sequence
tgatggtatgcgtcgttcgttccc

SEQ ID NO: 504 - DNA, 24 bp, Artificial Sequence
  Description of Artificial Sequence:  Hypothetical Probe Sequence
tgatgcaagatggatgtcccagcc

SEQ ID NO: 505 - DNA, 24 bp, Artificial Sequence
  Description of Artificial Sequence:  Hypothetical Probe Sequence
tgatgatggcaacagctcccccat

SEQ ID NO: 506 - DNA, 24 bp, Artificial Sequence
  Description of Artificial Sequence:  Hypothetical Probe Sequence
tgatgatgacgggacccacgtgcg

SEQ ID NO: 507 - DNA, 24 bp, Artificial Sequence
  Description of Artificial Sequence:  Hypothetical Probe Sequence
tgattcccgagtagcccacgtcgt

SEQ ID NO: 508 - DNA, 24 bp, Artificial Sequence
  Description of Artificial Sequence:  Hypothetical Probe Sequence
tgattcccgtgcaaagacggacct

SEQ ID NO: 509 - DNA, 24 bp, Artificial Sequence
  Description of Artificial Sequence:  Hypothetical Probe Sequence
tgattgcggagtcttgacggggac

SEQ ID NO: 510 - DNA, 24 bp, Artificial Sequence
  Description of Artificial Sequence:  Hypothetical Probe Sequence
tgattgcggatgaatcatcgtgcg

SEQ ID NO: 511 - DNA, 24 bp, Artificial Sequence
  Description of Artificial Sequence:  Hypothetical Probe Sequence
tgatcagcatcgtcccgcaaatcg

SEQ ID NO: 512 - DNA, 24 bp, Artificial Sequence
  Description of Artificial Sequence:  Hypothetical Probe Sequence
tgatgaccgatgcacgacgggcaa

SEQ ID NO: 513 - DNA, 24 bp, Artificial Sequence
  Description of Artificial Sequence:  Hypothetical Probe Sequence
tgatgaccgtgcagccggtactca

SEQ ID NO: 514 - DNA, 24 bp, Artificial Sequence
  Description of Artificial Sequence:  Hypothetical Probe Sequence
tgatgtgctccctacatccctgcg

SEQ ID NO: 515 - DNA, 24 bp, Artificial Sequence
  Description of Artificial Sequence:  Hypothetical Probe Sequence
tgatgtgcggacgatgagccggta

SEQ ID NO: 516 - DNA, 24 bp, Artificial Sequence
  Description of Artificial Sequence:  Hypothetical Probe Sequence
tgatggacggacatcggaccgctt

SEQ ID NO: 517 - DNA, 24 bp, Artificial Sequence
  Description of Artificial Sequence:  Hypothetical Probe Sequence
tgatacggtcgtcagccgtttgcg

SEQ ID NO: 518 - DNA, 24 bp, Artificial Sequence
  Description of Artificial Sequence:  Hypothetical Probe Sequence
tgatacggcttgcacgacggagga

SEQ ID NO: 519 - DNA, 24 bp, Artificial Sequence
  Description of Artificial Sequence:  Hypothetical Probe Sequence
tgatacggcgttttagcacgtgcg

SEQ ID NO: 520 - DNA, 24 bp, Artificial Sequence
  Description of Artificial Sequence:  Hypothetical Probe Sequence
tgatacggcctagatgacggcgtt

SEQ ID NO: 521 - DNA, 24 bp, Artificial Sequence
  Description of Artificial Sequence:  Hypothetical Probe Sequence
ttagcttggcaactcacagcgcaa

SEQ ID NO: 522 - DNA, 24 bp, Artificial Sequence
  Description of Artificial Sequence:  Hypothetical Probe Sequence
ttagcgttagcctctgcagcgcaa

SEQ ID NO: 523 - DNA, 24 bp, Artificial Sequence
  Description of Artificial Sequence:  Hypothetical Probe Sequence
ttagccatagccttgaagccggac

SEQ ID NO: 524 - DNA, 24 bp, Artificial Sequence
  Description of Artificial Sequence:  Hypothetical Probe Sequence
ttagcgaaacctagccagccccta

SEQ ID NO: 525 - DNA, 24 bp, Artificial Sequence
  Description of Artificial Sequence:  Hypothetical Probe Sequence
ttagaggatgcgctcatccccgtt

SEQ ID NO: 526 - DNA, 24 bp, Artificial Sequence
  Description of Artificial Sequence:  Hypothetical Probe Sequence
ttaggatgcgaacacggatgtgcg

SEQ ID NO: 527 - DNA, 24 bp, Artificial Sequence
  Description of Artificial Sequence:  Hypothetical Probe Sequence
ttagtccccgttcgaagatgcgaa

SEQ ID NO: 528 - DNA, 24 bp, Artificial Sequence
  Description of Artificial Sequence:  Hypothetical Probe Sequence
ttagtcccatcgacggtgcgggta

SEQ ID NO: 529 - DNA, 24 bp, Artificial Sequence
  Description of Artificial Sequence:  Hypothetical Probe Sequence
ttagtcccagcccgaaagcccagc

SEQ ID NO: 530 - DNA, 24 bp, Artificial Sequence
  Description of Artificial Sequence:  Hypothetical Probe Sequence
ttagtgcgcttgtgcggtgcatcg

SEQ ID NO: 531 - DNA, 24 bp, Artificial Sequence
  Description of Artificial Sequence:  Hypothetical Probe Sequence
ttagcagccctatctgcagcgacc

SEQ ID NO: 532 - DNA, 24 bp, Artificial Sequence
  Description of Artificial Sequence:  Hypothetical Probe Sequence
ttagcagcacggtacacacggctt

SEQ ID NO: 533 - DNA, 24 bp, Artificial Sequence
  Description of Artificial Sequence:  Hypothetical Probe Sequence
ttaggaccgatggcttcacgtgcg

SEQ ID NO: 534 - DNA, 24 bp, Artificial Sequence
  Description of Artificial Sequence:  Hypothetical Probe Sequence
ttaggtgcgaccgtgccgtttgat

SEQ ID NO: 535 - DNA, 24 bp, Artificial Sequence
  Description of Artificial Sequence:  Hypothetical Probe Sequence
ttagggacatcgcctaagcccgaa

SEQ ID NO: 536 - DNA, 24 bp, Artificial Sequence
  Description of Artificial Sequence:  Hypothetical Probe Sequence
ttagggaccctatccccgaatccc

SEQ ID NO: 537 - DNA, 24 bp, Artificial Sequence
  Description of Artificial Sequence:  Hypothetical Probe Sequence
ttagggactccctctgacggcagc

SEQ ID NO: 538 - DNA, 24 bp, Artificial Sequence
  Description of Artificial Sequence:  Hypothetical Probe Sequence
ttagggaccacgtcgtatcgagcc

SEQ ID NO: 539 - DNA, 24 bp, Artificial Sequence
  Description of Artificial Sequence:  Hypothetical Probe Sequence
ttagacggatcgatcgagccggac

SEQ ID NO: 540 - DNA, 24 bp, Artificial Sequence
  Description of Artificial Sequence:  Hypothetical Probe Sequence
ttagacggaggaacggcacggcaa

SEQ ID NO: 541 - DNA, 24 bp, Artificial Sequence
  Description of Artificial Sequence:  Hypothetical Probe Sequence
ttagagccgcaagagtgtgccacg

SEQ ID NO: 542 - DNA, 24 bp, Artificial Sequence
  Description of Artificial Sequence:  Hypothetical Probe Sequence
aatcaaagcgtttcccagcccttg

SEQ ID NO: 543 - DNA, 24 bp, Artificial Sequence
  Description of Artificial Sequence:  Hypothetical Probe Sequence
aatccgttgcaactgtagcccacg

SEQ ID NO: 544 - DNA, 24 bp, Artificial Sequence
  Description of Artificial Sequence:  Hypothetical Probe Sequence
aatcctcaacggtcccatacacgg

SEQ ID NO: 545 - DNA, 24 bp, Artificial Sequence
  Description of Artificial Sequence:  Hypothetical Probe Sequence
aatccgaaaatcagcctgcgcgtt

SEQ ID NO: 546 - DNA, 24 bp, Artificial Sequence
  Description of Artificial Sequence:  Hypothetical Probe Sequence
aatccgaaaaaggatgcgaatgcg

SEQ ID NO: 547 - DNA, 24 bp, Artificial Sequence
  Description of Artificial Sequence:  Hypothetical Probe Sequence
aatccgaactcaacgggcaagtgc

SEQ ID NO: 548 - DNA, 24 bp, Artificial Sequence
  Description of Artificial Sequence:  Hypothetical Probe Sequence
aatccgaaagtgcacgcacggtgc

SEQ ID NO: 549 - DNA, 24 bp, Artificial Sequence
  Description of Artificial Sequence:  Hypothetical Probe Sequence
aatcggtagcaaaaagggacgcaa

SEQ ID NO: 550 - DNA, 24 bp, Artificial Sequence
  Description of Artificial Sequence:  Hypothetical Probe Sequence
aatccctatgcgtgtcatcggctt

SEQ ID NO: 551 - DNA, 24 bp, Artificial Sequence
  Description of Artificial Sequence:  Hypothetical Probe Sequence
aatctcccgtctcgaagacccgaa

SEQ ID NO: 552 - DNA, 24 bp, Artificial Sequence
  Description of Artificial Sequence:  Hypothetical Probe Sequence
aatctgcggctttacaggacgctt

SEQ ID NO: 553 - DNA, 24 bp, Artificial Sequence
  Description of Artificial Sequence:  Hypothetical Probe Sequence
aatctgcgaggagacctcccacgg

SEQ ID NO: 554 - DNA, 24 bp, Artificial Sequence
  Description of Artificial Sequence:  Hypothetical Probe Sequence
aatctgcggaccggtatcccacct

SEQ ID NO: 555 - DNA, 24 bp, Artificial Sequence
  Description of Artificial Sequence:  Hypothetical Probe Sequence
aatctgcggtgctctgacggtcgt

SEQ ID NO: 556 - DNA, 24 bp, Artificial Sequence
  Description of Artificial Sequence:  Hypothetical Probe Sequence
aatccacgtcgtacgggcaacagc

SEQ ID NO: 557 - DNA, 24 bp, Artificial Sequence
  Description of Artificial Sequence:  Hypothetical Probe Sequence
aatccagccttgcttgggacggac

SEQ ID NO: 558 - DNA, 24 bp, Artificial Sequence
  Description of Artificial Sequence:  Hypothetical Probe Sequence
aatccagccctaaggaggacagcc

SEQ ID NO: 559 - DNA, 24 bp, Artificial Sequence
  Description of Artificial Sequence:  Hypothetical Probe Sequence
aatccagctgcgcgttcgaactgt

SEQ ID NO: 560 - DNA, 24 bp, Artificial Sequence
  Description of Artificial Sequence:  Hypothetical Probe Sequence
aatccagcacgggtctagccgatg

SEQ ID NO: 561 - DNA, 24 bp, Artificial Sequence
  Description of Artificial Sequence:  Hypothetical Probe Sequence
aatcgaccaatcgcttgaccgcaa

SEQ ID NO: 562 - DNA, 24 bp, Artificial Sequence
  Description of Artificial Sequence:  Hypothetical Probe Sequence
aatcgaccccatcgttagtgtgcg

SEQ ID NO: 563 - DNA, 24 bp, Artificial Sequence
  Description of Artificial Sequence:  Hypothetical Probe Sequence
aatcgacccctaacggaaagcgtt

SEQ ID NO: 564 - DNA, 24 bp, Artificial Sequence
  Description of Artificial Sequence:  Hypothetical Probe Sequence
aatcgaccgatgccattcgtcgaa

SEQ ID NO: 565 - DNA, 24 bp, Artificial Sequence
  Description of Artificial Sequence:  Hypothetical Probe Sequence
aatcgaccggacaggatgattgcg

SEQ ID NO: 566 - DNA, 24 bp, Artificial Sequence
  Description of Artificial Sequence:  Hypothetical Probe Sequence
aatcgtgcctcaataccagcacgg

SEQ ID NO: 567 - DNA, 24 bp, Artificial Sequence
  Description of Artificial Sequence:  Hypothetical Probe Sequence
aatcgtgcgatgcagcgtctgcaa

SEQ ID NO: 568 - DNA, 24 bp, Artificial Sequence
  Description of Artificial Sequence:  Hypothetical Probe Sequence
aatcggacagccaggaatcgatcg

SEQ ID NO: 569 - DNA, 24 bp, Artificial Sequence
  Description of Artificial Sequence:  Hypothetical Probe Sequence
aatcacggctcactcatcccctca

SEQ ID NO: 570 - DNA, 24 bp, Artificial Sequence
  Description of Artificial Sequence:  Hypothetical Probe Sequence
aatcacggacctctcaagccgacc

SEQ ID NO: 571 - DNA, 24 bp, Artificial Sequence
  Description of Artificial Sequence:  Hypothetical Probe Sequence
aatcacgggatgcgaacgaagtgc

SEQ ID NO: 572 - DNA, 24 bp, Artificial Sequence
  Description of Artificial Sequence:  Hypothetical Probe Sequence
aatcagcccgttaaagtgcggatg

SEQ ID NO: 573 - DNA, 24 bp, Artificial Sequence
  Description of Artificial Sequence:  Hypothetical Probe Sequence
aatcagccctcaatcgcagcagcc

SEQ ID NO: 574 - DNA, 24 bp, Artificial Sequence
  Description of Artificial Sequence:  Hypothetical Probe Sequence
aatcagccggtaccatagcctgcg

SEQ ID NO: 575 - DNA, 24 bp, Artificial Sequence
  Description of Artificial Sequence:  Hypothetical Probe Sequence
aatcagccaggatgtccctatgcg

SEQ ID NO: 576 - DNA, 24 bp, Artificial Sequence
  Description of Artificial Sequence:  Hypothetical Probe Sequence
atacccatcgaaggactgcgcagc

SEQ ID NO: 577 - DNA, 24 bp, Artificial Sequence
  Description of Artificial Sequence:  Hypothetical Probe Sequence
atacgcaaacggctcatcccggta

SEQ ID NO: 578 - DNA, 24 bp, Artificial Sequence
  Description of Artificial Sequence:  Hypothetical Probe Sequence
ataccctaacggcagctgcgctgt

SEQ ID NO: 579 - DNA, 24 bp, Artificial Sequence
  Description of Artificial Sequence:  Hypothetical Probe Sequence
atacgatgacggcagctcccgcaa

SEQ ID NO: 580 - DNA, 24 bp, Artificial Sequence
  Description of Artificial Sequence:  Hypothetical Probe Sequence
atactgcgctgttccccacgagcc

SEQ ID NO: 581 - DNA, 24 bp, Artificial Sequence
  Description of Artificial Sequence:  Hypothetical Probe Sequence
atactgcgcgaattaggcaaagcc

SEQ ID NO: 582 - DNA, 24 bp, Artificial Sequence
  Description of Artificial Sequence:  Hypothetical Probe Sequence
ataccacgatcgtccccgaacgaa

SEQ ID NO: 583 - DNA, 24 bp, Artificial Sequence
  Description of Artificial Sequence:  Hypothetical Probe Sequence
ataccagcggaccctaagccagcc

SEQ ID NO: 584 - DNA, 24 bp, Artificial Sequence
  Description of Artificial Sequence:  Hypothetical Probe Sequence
atacgaccgagttgcgtcccgatg

SEQ ID NO: 585 - DNA, 24 bp, Artificial Sequence
  Description of Artificial Sequence:  Hypothetical Probe Sequence
atacgtgctgcgggtaccatggac

SEQ ID NO: 586 - DNA, 24 bp, Artificial Sequence
  Description of Artificial Sequence:  Hypothetical Probe Sequence
atacgtgccacgatcgcttgtccc

SEQ ID NO: 587 - DNA, 24 bp, Artificial Sequence
  Description of Artificial Sequence:  Hypothetical Probe Sequence
atacggacgacctgtcggacgcaa

SEQ ID NO: 588 - DNA, 24 bp, Artificial Sequence
  Description of Artificial Sequence:  Hypothetical Probe Sequence
atacacggcctaacggtgtccgtt

SEQ ID NO: 589 - DNA, 24 bp, Artificial Sequence
  Description of Artificial Sequence:  Hypothetical Probe Sequence
atacacggtccccgttggaccagc

SEQ ID NO: 590 - DNA, 24 bp, Artificial Sequence
  Description of Artificial Sequence:  Hypothetical Probe Sequence
atacagcccgaacagctccctcgt

SEQ ID NO: 591 - DNA, 24 bp, Artificial Sequence
  Description of Artificial Sequence:  Hypothetical Probe Sequence
aaagtcgtagccatcgcacgcagc

SEQ ID NO: 592 - DNA, 24 bp, Artificial Sequence
  Description of Artificial Sequence:  Hypothetical Probe Sequence
aaagcgttttgacgttagcctgcg

SEQ ID NO: 593 - DNA, 24 bp, Artificial Sequence
  Description of Artificial Sequence:  Hypothetical Probe Sequence
aaagcgttatcgtcccgacctctg

SEQ ID NO: 594 - DNA, 24 bp, Artificial Sequence
  Description of Artificial Sequence:  Hypothetical Probe Sequence
aaagcgttgaccgatgacggccat

SEQ ID NO: 595 - DNA, 24 bp, Artificial Sequence
  Description of Artificial Sequence:  Hypothetical Probe Sequence
aaagccatgctttccctcccaaag

SEQ ID NO: 596 - DNA, 24 bp, Artificial Sequence
  Description of Artificial Sequence:  Hypothetical Probe Sequence
aaagcgaatcgttcgtcttgcacg

SEQ ID NO: 597 - DNA, 24 bp, Artificial Sequence
  Description of Artificial Sequence:  Hypothetical Probe Sequence
aaagcgaacgaagatgccatcagc

SEQ ID NO: 598 - DNA, 24 bp, Artificial Sequence
  Description of Artificial Sequence:  Hypothetical Probe Sequence
aaagcgaacagcgacccctacagc

SEQ ID NO: 599 - DNA, 24 bp, Artificial Sequence
  Description of Artificial Sequence:  Hypothetical Probe Sequence
aaaggcttatcgtgcgtcgtgctt

SEQ ID NO: 600 - DNA, 24 bp, Artificial Sequence
  Description of Artificial Sequence:  Hypothetical Probe Sequence
aaaggcaaaaagtgtccagcggac

SEQ ID NO: 601 - DNA, 24 bp, Artificial Sequence
  Description of Artificial Sequence:  Hypothetical Probe Sequence
aaaggcaatcgttgtcggtatgcg

SEQ ID NO: 602 - DNA, 24 bp, Artificial Sequence
  Description of Artificial Sequence:  Hypothetical Probe Sequence
aaaggcaaagtgcgaacacggcaa

SEQ ID NO: 603 - DNA, 24 bp, Artificial Sequence
  Description of Artificial Sequence:  Hypothetical Probe Sequence
aaaggcaacagcgcaagcaaggac

SEQ ID NO: 604 - DNA, 24 bp, Artificial Sequence
  Description of Artificial Sequence:  Hypothetical Probe Sequence
aaagatcggcaaaaagtccccgaa

SEQ ID NO: 605 - DNA, 24 bp, Artificial Sequence
  Description of Artificial Sequence:  Hypothetical Probe Sequence
aaagatcgcagcgcttgatgtgcg

SEQ ID NO: 606 - DNA, 24 bp, Artificial Sequence
  Description of Artificial Sequence:  Hypothetical Probe Sequence
aaaggatgctcaagcccagcacgg

SEQ ID NO: 607 - DNA, 24 bp, Artificial Sequence
  Description of Artificial Sequence:  Hypothetical Probe Sequence
aaagtcccgagttgcgtgcgttag

SEQ ID NO: 608 - DNA, 24 bp, Artificial Sequence
  Description of Artificial Sequence:  Hypothetical Probe Sequence
aaagtgcgagccatcgacctacgg

SEQ ID NO: 609 - DNA, 24 bp, Artificial Sequence
  Description of Artificial Sequence:  Hypothetical Probe Sequence
aaagcacggcttggtagtgcgacc

SEQ ID NO: 610 - DNA, 24 bp, Artificial Sequence
  Description of Artificial Sequence:  Hypothetical Probe Sequence
aaagcacggcaatgatcacggacc

SEQ ID NO: 611 - DNA, 24 bp, Artificial Sequence
  Description of Artificial Sequence:  Hypothetical Probe Sequence
aaagcacgagtgggacgtgcatcg

SEQ ID NO: 612 - DNA, 24 bp, Artificial Sequence
  Description of Artificial Sequence:  Hypothetical Probe Sequence
aaagcagcgcttggtaatcgggta

SEQ ID NO: 613 - DNA, 24 bp, Artificial Sequence
  Description of Artificial Sequence:  Hypothetical Probe Sequence
aaaggaccggtaaaagcgaagcaa

SEQ ID NO: 614 - DNA, 24 bp, Artificial Sequence
  Description of Artificial Sequence:  Hypothetical Probe Sequence
aaaggtgctcgtcagcagtgcgtt

SEQ ID NO: 615 - DNA, 24 bp, Artificial Sequence
  Description of Artificial Sequence:  Hypothetical Probe Sequence
aaaggtgccttggtgcgatgccta

SEQ ID NO: 616 - DNA, 24 bp, Artificial Sequence
  Description of Artificial Sequence:  Hypothetical Probe Sequence
aaaggtgcctcatgtcacgggtgc

SEQ ID NO: 617 - DNA, 24 bp, Artificial Sequence
  Description of Artificial Sequence:  Hypothetical Probe Sequence
aaaggtgccgaaatcgggacttga

SEQ ID NO: 618 - DNA, 24 bp, Artificial Sequence
  Description of Artificial Sequence:  Hypothetical Probe Sequence
aaaggtgccagcggtaggaccagc

SEQ ID NO: 619 - DNA, 24 bp, Artificial Sequence
  Description of Artificial Sequence:  Hypothetical Probe Sequence
aaagggacttgaacgggcttgcaa

SEQ ID NO: 620 - DNA, 24 bp, Artificial Sequence
  Description of Artificial Sequence:  Hypothetical Probe Sequence
aaagggacctcagcaaagccccat

SEQ ID NO: 621 - DNA, 24 bp, Artificial Sequence
  Description of Artificial Sequence:  Hypothetical Probe Sequence
aaagggacccatgcttccatgacc

SEQ ID NO: 622 - DNA, 24 bp, Artificial Sequence
  Description of Artificial Sequence:  Hypothetical Probe Sequence
aaagacggtctggcttacgggtgc

SEQ ID NO: 623 - DNA, 24 bp, Artificial Sequence
  Description of Artificial Sequence:  Hypothetical Probe Sequence
aaagacggcgttgtgcaaagtccc

SEQ ID NO: 624 - DNA, 24 bp, Artificial Sequence
  Description of Artificial Sequence:  Hypothetical Probe Sequence
aaagacggatcgcacgcctagcaa

SEQ ID NO: 625 - DNA, 24 bp, Artificial Sequence
  Description of Artificial Sequence:  Hypothetical Probe Sequence
aaagagccgagtggacatcgtgcg

SEQ ID NO: 626 - DNA, 24 bp, Artificial Sequence
  Description of Artificial Sequence:  Hypothetical Probe Sequence
aaagagccagtgacggccatcacg

SEQ ID NO: 627 - DNA, 24 bp, Artificial Sequence
  Description of Artificial Sequence:  Hypothetical Probe Sequence
tacatccccgaaggtaacggcagc

SEQ ID NO: 628 - DNA, 24 bp, Artificial Sequence
  Description of Artificial Sequence:  Hypothetical Probe Sequence
tacatcccatcggagttcccgacc

SEQ ID NO: 629 - DNA, 24 bp, Artificial Sequence
  Description of Artificial Sequence:  Hypothetical Probe Sequence
tacatgcgggacgagtgacccacg

SEQ ID NO: 630 - DNA, 24 bp, Artificial Sequence
  Description of Artificial Sequence:  Hypothetical Probe Sequence
tacacagctgcgtacatgcgccat

SEQ ID NO: 631 - DNA, 24 bp, Artificial Sequence
  Description of Artificial Sequence:  Hypothetical Probe Sequence
tacagaccgcaacgaaagcctccc

SEQ ID NO: 632 - DNA, 24 bp, Artificial Sequence
  Description of Artificial Sequence:  Hypothetical Probe Sequence
tacagtgcacgggcaagaccgtgc

SEQ ID NO: 633 - DNA, 24 bp, Artificial Sequence
  Description of Artificial Sequence:  Hypothetical Probe Sequence
tacaacggtcgtatcgcttgccat

SEQ ID NO: 634 - DNA, 24 bp, Artificial Sequence
  Description of Artificial Sequence:  Hypothetical Probe Sequence
tacaacggcttgctcagaccgcaa

SEQ ID NO: 635 - DNA, 24 bp, Artificial Sequence
  Description of Artificial Sequence:  Hypothetical Probe Sequence
tacaacgggagttgcgcagcctca

SEQ ID NO: 636 - DNA, 24 bp, Artificial Sequence
  Description of Artificial Sequence:  Hypothetical Probe Sequence
tacaacggacctgatgcagcgcaa

SEQ ID NO: 637 - DNA, 24 bp, Artificial Sequence
  Description of Artificial Sequence:  Hypothetical Probe Sequence
tacaacggcacgtgcgacctttag

SEQ ID NO: 638 - DNA, 24 bp, Artificial Sequence
  Description of Artificial Sequence:  Hypothetical Probe Sequence
tacaagccgcaagtcttgcgttga

SEQ ID NO: 639 - DNA, 24 bp, Artificial Sequence
  Description of Artificial Sequence:  Hypothetical Probe Sequence
tacaagccatcgcagccttggcaa

SEQ ID NO: 640 - DNA, 24 bp, Artificial Sequence
  Description of Artificial Sequence:  Hypothetical Probe Sequence
tctgtctgcgtttgcggcaaagcc

SEQ ID NO: 641 - DNA, 24 bp, Artificial Sequence
  Description of Artificial Sequence:  Hypothetical Probe Sequence
tctgtctgcgaatgcggaccgtct

SEQ ID NO: 642 - DNA, 24 bp, Artificial Sequence
  Description of Artificial Sequence:  Hypothetical Probe Sequence
tctgtcgtgcttgaccagcctgtc

SEQ ID NO: 643 - DNA, 24 bp, Artificial Sequence
  Description of Artificial Sequence:  Hypothetical Probe Sequence
tctgcttgcgttgctttgtccgtt

SEQ ID NO: 644 - DNA, 24 bp, Artificial Sequence
  Description of Artificial Sequence:  Hypothetical Probe Sequence
tctgcgttttgagtgcagcccagc

SEQ ID NO: 645 - DNA, 24 bp, Artificial Sequence
  Description of Artificial Sequence:  Hypothetical Probe Sequence
tctgcgttcgttcttgcgaaacct

SEQ ID NO: 646 - DNA, 24 bp, Artificial Sequence
  Description of Artificial Sequence:  Hypothetical Probe Sequence
tctgcgttgatgaggacagctgcg

SEQ ID NO: 647 - DNA, 24 bp, Artificial Sequence
  Description of Artificial Sequence:  Hypothetical Probe Sequence
tctgctcagcaaacctgtgcacgg

SEQ ID NO: 648 - DNA, 24 bp, Artificial Sequence
  Description of Artificial Sequence:  Hypothetical Probe Sequence
tctgctcacagcacgggtgcgatg

SEQ ID NO: 649 - DNA, 24 bp, Artificial Sequence
  Description of Artificial Sequence:  Hypothetical Probe Sequence
tctgctgtcacggacccagccgtt

SEQ ID NO: 650 - DNA, 24 bp, Artificial Sequence
  Description of Artificial Sequence:  Hypothetical Probe Sequence
tctgccatcgaaagtggtgccttg

SEQ ID NO: 651 - DNA, 24 bp, Artificial Sequence
  Description of Artificial Sequence:  Hypothetical Probe Sequence
tctgccatggtacgtttgcggacc

SEQ ID NO: 652 - DNA, 24 bp, Artificial Sequence
  Description of Artificial Sequence:  Hypothetical Probe Sequence
tctgccattcccatcgtctgcacg

SEQ ID NO: 653 - DNA, 24 bp, Artificial Sequence
  Description of Artificial Sequence:  Hypothetical Probe Sequence
tctgcgaatctgcgtttgattgcg

SEQ ID NO: 654 - DNA, 24 bp, Artificial Sequence
  Description of Artificial Sequence:  Hypothetical Probe Sequence
tctgcgaaagtgacggagcccgtt

SEQ ID NO: 655 - DNA, 24 bp, Artificial Sequence
  Description of Artificial Sequence:  Hypothetical Probe Sequence
tctgcgaagtgccttgtcgttccc

SEQ ID NO: 656 - DNA, 24 bp, Artificial Sequence
  Description of Artificial Sequence:  Hypothetical Probe Sequence
tctggcttaggaacgggcttcttg

SEQ ID NO: 657 - DNA, 24 bp, Artificial Sequence
  Description of Artificial Sequence:  Hypothetical Probe Sequence
tctggctttgcgaatccttggctt

SEQ ID NO: 658 - DNA, 24 bp, Artificial Sequence
  Description of Artificial Sequence:  Hypothetical Probe Sequence
tctggcttgaccgacccgaagatg

SEQ ID NO: 659 - DNA, 24 bp, Artificial Sequence
  Description of Artificial Sequence:  Hypothetical Probe Sequence
tctgggtatccccgaatgtccacg

SEQ ID NO: 660 - DNA, 24 bp, Artificial Sequence
  Description of Artificial Sequence:  Hypothetical Probe Sequence
tctggcaatgatatcgcacggtgc

SEQ ID NO: 661 - DNA, 24 bp, Artificial Sequence
  Description of Artificial Sequence:  Hypothetical Probe Sequence
tctggcaaaaaggctttccccttg

SEQ ID NO: 662 - DNA, 24 bp, Artificial Sequence
  Description of Artificial Sequence:  Hypothetical Probe Sequence
tctggcaactgtcagcgcttcgaa

SEQ ID NO: 663 - DNA, 24 bp, Artificial Sequence
  Description of Artificial Sequence:  Hypothetical Probe Sequence
tctggcaaggtatctgcagccagc

SEQ ID NO: 664 - DNA, 24 bp, Artificial Sequence
  Description of Artificial Sequence:  Hypothetical Probe Sequence
tctgagtggcaatccctccctgcg

SEQ ID NO: 665 - DNA, 24 bp, Artificial Sequence
  Description of Artificial Sequence:  Hypothetical Probe Sequence
tctgatcggtgctgcgaatcgtgc

SEQ ID NO: 666 - DNA, 24 bp, Artificial Sequence
  Description of Artificial Sequence:  Hypothetical Probe Sequence
tctgcctacagccgaatcccgctt

SEQ ID NO: 667 - DNA, 24 bp, Artificial Sequence
  Description of Artificial Sequence:  Hypothetical Probe Sequence
tctggatgccatgtgccgaacagc

SEQ ID NO: 668 - DNA, 24 bp, Artificial Sequence
  Description of Artificial Sequence:  Hypothetical Probe Sequence
tctggatgcgaaaaagtgcgccta

SEQ ID NO: 669 - DNA, 24 bp, Artificial Sequence
  Description of Artificial Sequence:  Hypothetical Probe Sequence
tctggatgggacggtatgcgcttg

SEQ ID NO: 670 - DNA, 24 bp, Artificial Sequence
  Description of Artificial Sequence:  Hypothetical Probe Sequence
tctgtcccccattcgtgatggtgc

SEQ ID NO: 671 - DNA, 24 bp, Artificial Sequence
  Description of Artificial Sequence:  Hypothetical Probe Sequence
tctgtcccgctttctggatgtgcg

SEQ ID NO: 672 - DNA, 24 bp, Artificial Sequence
  Description of Artificial Sequence:  Hypothetical Probe Sequence
tctgtcccggtaccatatcgcgaa

SEQ ID NO: 673 - DNA, 24 bp, Artificial Sequence
  Description of Artificial Sequence:  Hypothetical Probe Sequence
tctgtcccgagtggacgcaaccat

SEQ ID NO: 674 - DNA, 24 bp, Artificial Sequence
  Description of Artificial Sequence:  Hypothetical Probe Sequence
tctgtcccagcccctatcccacct

SEQ ID NO: 675 - DNA, 24 bp, Artificial Sequence
  Description of Artificial Sequence:  Hypothetical Probe Sequence
tctgtgcgtctgtccccgaagcaa

SEQ ID NO: 676 - DNA, 24 bp, Artificial Sequence
  Description of Artificial Sequence:  Hypothetical Probe Sequence
tctgtgcgtgcggatgacctacgg

SEQ ID NO: 677 - DNA, 24 bp, Artificial Sequence
  Description of Artificial Sequence:  Hypothetical Probe Sequence
tctgtgcggacctcgttgatcacg

SEQ ID NO: 678 - DNA, 24 bp, Artificial Sequence
  Description of Artificial Sequence:  Hypothetical Probe Sequence
tctgcacgcttgttagcagcacct

SEQ ID NO: 679 - DNA, 24 bp, Artificial Sequence
  Description of Artificial Sequence:  Hypothetical Probe Sequence
tctgcacgccatgtgccgtttaca

SEQ ID NO: 680 - DNA, 24 bp, Artificial Sequence
  Description of Artificial Sequence:  Hypothetical Probe Sequence
tctgcacggagttgtcggacgtgc

SEQ ID NO: 681 - DNA, 24 bp, Artificial Sequence
  Description of Artificial Sequence:  Hypothetical Probe Sequence
tctgcacgcctaagccctgtgacc

SEQ ID NO: 682 - DNA, 24 bp, Artificial Sequence
  Description of Artificial Sequence:  Hypothetical Probe Sequence
tctgcacggatgacggacctcgaa

SEQ ID NO: 683 - DNA, 24 bp, Artificial Sequence
  Description of Artificial Sequence:  Hypothetical Probe Sequence
tctgcagcctgtggtacacgcgtt

SEQ ID NO: 684 - DNA, 24 bp, Artificial Sequence
  Description of Artificial Sequence:  Hypothetical Probe Sequence
tctgcagccgaagcttgcaaacgg

SEQ ID NO: 685 - DNA, 24 bp, Artificial Sequence
  Description of Artificial Sequence:  Hypothetical Probe Sequence
tctgcagcgtgcgcaaagcctaca

SEQ ID NO: 686 - DNA, 24 bp, Artificial Sequence
  Description of Artificial Sequence:  Hypothetical Probe Sequence
tctggacctgcgccatctcagcaa

SEQ ID NO: 687 - DNA, 24 bp, Artificial Sequence
  Description of Artificial Sequence:  Hypothetical Probe Sequence
tctggacccacggacctgtccagc

SEQ ID NO: 688 - DNA, 24 bp, Artificial Sequence
  Description of Artificial Sequence:  Hypothetical Probe Sequence
tctggaccgaccagtgcgttccat

SEQ ID NO: 689 - DNA, 24 bp, Artificial Sequence
  Description of Artificial Sequence:  Hypothetical Probe Sequence
tctggtgctcgtctgtgtgcacgg

SEQ ID NO: 690 - DNA, 24 bp, Artificial Sequence
  Description of Artificial Sequence:  Hypothetical Probe Sequence
tctggtgcggtacagcctcaatcg

SEQ ID NO: 691 - DNA, 24 bp, Artificial Sequence
  Description of Artificial Sequence:  Hypothetical Probe Sequence
tctggtgcatcgggacatcggtgc

SEQ ID NO: 692 - DNA, 24 bp, Artificial Sequence
  Description of Artificial Sequence:  Hypothetical Probe Sequence
tctgggaccgttgtctagcccgtt

SEQ ID NO: 693 - DNA, 24 bp, Artificial Sequence
  Description of Artificial Sequence:  Hypothetical Probe Sequence
tctgggaccctaatcgacggcgtt

SEQ ID NO: 694 - DNA, 24 bp, Artificial Sequence
  Description of Artificial Sequence:  Hypothetical Probe Sequence
tctgacgggagtgcaacacggacc

SEQ ID NO: 695 - DNA, 24 bp, Artificial Sequence
  Description of Artificial Sequence:  Hypothetical Probe Sequence
tctgacgggcaacttgatcgctca

SEQ ID NO: 696 - DNA, 24 bp, Artificial Sequence
  Description of Artificial Sequence:  Hypothetical Probe Sequence
tctgacgggatgacctagccgatg

SEQ ID NO: 697 - DNA, 24 bp, Artificial Sequence
  Description of Artificial Sequence:  Hypothetical Probe Sequence
tctgacggacgggcttagtgtgcg

SEQ ID NO: 698 - DNA, 24 bp, Artificial Sequence
  Description of Artificial Sequence:  Hypothetical Probe Sequence
tctgagccaaaggtgcccatcgtt

SEQ ID NO: 699 - DNA, 24 bp, Artificial Sequence
  Description of Artificial Sequence:  Hypothetical Probe Sequence
tctgagccgcaaggtaacggacct

SEQ ID NO: 700 - DNA, 24 bp, Artificial Sequence
  Description of Artificial Sequence:  Hypothetical Probe Sequence
tgtcttgaagccccattgcgccta

SEQ ID NO: 701 - DNA, 24 bp, Artificial Sequence
  Description of Artificial Sequence:  Hypothetical Probe Sequence
tgtcaatccagcgtgctgcgtgcg

SEQ ID NO: 702 - DNA, 24 bp, Artificial Sequence
  Description of Artificial Sequence:  Hypothetical Probe Sequence
tgtcaatcacggagcccacgggac

SEQ ID NO: 703 - DNA, 24 bp, Artificial Sequence
  Description of Artificial Sequence:  Hypothetical Probe Sequence
tgtcaatcagccagcccagctccc

SEQ ID NO: 704 - DNA, 24 bp, Artificial Sequence
  Description of Artificial Sequence:  Hypothetical Probe Sequence
tgtcaaagccatacggcagcgatg

SEQ ID NO: 705 - DNA, 24 bp, Artificial Sequence
  Description of Artificial Sequence:  Hypothetical Probe Sequence
tgtcaaagcagccacgtgattgcg

SEQ ID NO: 706 - DNA, 24 bp, Artificial Sequence
  Description of Artificial Sequence:  Hypothetical Probe Sequence
tgtctgtccgaaggaccagctccc

SEQ ID NO: 707 - DNA, 24 bp, Artificial Sequence
  Description of Artificial Sequence:  Hypothetical Probe Sequence
tgtctgtcgcaaagccaaagtccc

SEQ ID NO: 708 - DNA, 24 bp, Artificial Sequence
  Description of Artificial Sequence:  Hypothetical Probe Sequence
tgtctcgtcacgtgcggacctgcg

SEQ ID NO: 709 - DNA, 24 bp, Artificial Sequence
  Description of Artificial Sequence:  Hypothetical Probe Sequence
tgtctcgtacggcgttttgatgcg

SEQ ID NO: 710 - DNA, 24 bp, Artificial Sequence
  Description of Artificial Sequence:  Hypothetical Probe Sequence
tgtccttgctcaatcggtgcgtgc

SEQ ID NO: 711 - DNA, 24 bp, Artificial Sequence
  Description of Artificial Sequence:  Hypothetical Probe Sequence
tgtccttgcacgttaggacccgaa

SEQ ID NO: 712 - DNA, 24 bp, Artificial Sequence
  Description of Artificial Sequence:  Hypothetical Probe Sequence
tgtccttggacccgaagtgcccta

SEQ ID NO: 713 - DNA, 24 bp, Artificial Sequence
  Description of Artificial Sequence:  Hypothetical Probe Sequence
tgtccgttaccttcccgaccgacc

SEQ ID NO: 714 - DNA, 24 bp, Artificial Sequence
  Description of Artificial Sequence:  Hypothetical Probe Sequence
tgtcctcagcaatgtcggacagcc

SEQ ID NO: 715 - DNA, 24 bp, Artificial Sequence
  Description of Artificial Sequence:  Hypothetical Probe Sequence
tgtcctcatcccacctcacgagcc

SEQ ID NO: 716 - DNA, 24 bp, Artificial Sequence
  Description of Artificial Sequence:  Hypothetical Probe Sequence
tgtcctgtacggaatcagccgacc

SEQ ID NO: 717 - DNA, 24 bp, Artificial Sequence
  Description of Artificial Sequence:  Hypothetical Probe Sequence
tgtcccatcttggacccagcacgg

SEQ ID NO: 718 - DNA, 24 bp, Artificial Sequence
  Description of Artificial Sequence:  Hypothetical Probe Sequence
tgtcccatcgaaaatccgaaccat

SEQ ID NO: 719 - DNA, 24 bp, Artificial Sequence
  Description of Artificial Sequence:  Hypothetical Probe Sequence
tgtcccatgcaaaggaaggagcaa

SEQ ID NO: 720 - DNA, 24 bp, Artificial Sequence
  Description of Artificial Sequence:  Hypothetical Probe Sequence
tgtcccatcctacgttgtgcgcaa

SEQ ID NO: 721 - DNA, 24 bp, Artificial Sequence
  Description of Artificial Sequence:  Hypothetical Probe Sequence
tgtcccatgatggcaagtgccagc

SEQ ID NO: 722 - DNA, 24 bp, Artificial Sequence
  Description of Artificial Sequence:  Hypothetical Probe Sequence
tgtcccatcagcacgggatgagga

SEQ ID NO: 723 - DNA, 24 bp, Artificial Sequence
  Description of Artificial Sequence:  Hypothetical Probe Sequence
tgtcccatagccatactgcggtgc

SEQ ID NO: 724 - DNA, 24 bp, Artificial Sequence
  Description of Artificial Sequence:  Hypothetical Probe Sequence
tgtccgaacgttgcttggacgatg

SEQ ID NO: 725 - DNA, 24 bp, Artificial Sequence
  Description of Artificial Sequence:  Hypothetical Probe Sequence
tgtccgaagcttcttgggacggta

SEQ ID NO: 726 - DNA, 24 bp, Artificial Sequence
  Description of Artificial Sequence:  Hypothetical Probe Sequence
tgtccgaaacctcgaatgcgagtg

SEQ ID NO: 727 - DNA, 24 bp, Artificial Sequence
  Description of Artificial Sequence:  Hypothetical Probe Sequence
tgtccgaaaggaaggaggacgcaa

SEQ ID NO: 728 - DNA, 24 bp, Artificial Sequence
  Description of Artificial Sequence:  Hypothetical Probe Sequence
tgtccgaacctactcatccccacg

SEQ ID NO: 729 - DNA, 24 bp, Artificial Sequence
  Description of Artificial Sequence:  Hypothetical Probe Sequence
tgtccgaacagcggacaaagagcc

SEQ ID NO: 730 - DNA, 24 bp, Artificial Sequence
  Description of Artificial Sequence:  Hypothetical Probe Sequence
tgtcgcttcgttcgttatcggcaa

SEQ ID NO: 731 - DNA, 24 bp, Artificial Sequence
  Description of Artificial Sequence:  Hypothetical Probe Sequence
tgtcgcttccatcgttgatgacgg

SEQ ID NO: 732 - DNA, 24 bp, Artificial Sequence
  Description of Artificial Sequence:  Hypothetical Probe Sequence
tgtcgcttgcttccattgtcgctt

SEQ ID NO: 733 - DNA, 24 bp, Artificial Sequence
  Description of Artificial Sequence:  Hypothetical Probe Sequence
tgtcgcttatcgacctagccgtgc

SEQ ID NO: 734 - DNA, 24 bp, Artificial Sequence
  Description of Artificial Sequence:  Hypothetical Probe Sequence
tgtcgcttaggaagccacggcttg

SEQ ID NO: 735 - DNA, 24 bp, Artificial Sequence
  Description of Artificial Sequence:  Hypothetical Probe Sequence
tgtcggtatcgttccctcccgtgc

SEQ ID NO: 736 - DNA, 24 bp, Artificial Sequence
  Description of Artificial Sequence:  Hypothetical Probe Sequence
tgtcggtagcaaacctacggcagc

SEQ ID NO: 737 - DNA, 24 bp, Artificial Sequence
  Description of Artificial Sequence:  Hypothetical Probe Sequence
tgtcggtacagccagcgcaagctt

SEQ ID NO: 738 - DNA, 24 bp, Artificial Sequence
  Description of Artificial Sequence:  Hypothetical Probe Sequence
tgtcgtcttcgtggaccgtttccc

SEQ ID NO: 739 - DNA, 24 bp, Artificial Sequence
  Description of Artificial Sequence:  Hypothetical Probe Sequence
tgtcgtctcgaatcccgaccacgg

SEQ ID NO: 740 - DNA, 24 bp, Artificial Sequence
  Description of Artificial Sequence:  Hypothetical Probe Sequence
tgtcgagtcagcagcccgaaccat

SEQ ID NO: 741 - DNA, 24 bp, Artificial Sequence
  Description of Artificial Sequence:  Hypothetical Probe Sequence
tgtcgcaattgaccatagccgacc

SEQ ID NO: 742 - DNA, 24 bp, Artificial Sequence
  Description of Artificial Sequence:  Hypothetical Probe Sequence
tgtcgcaaaatctcgtgatgtgcg

SEQ ID NO: 743 - DNA, 24 bp, Artificial Sequence
  Description of Artificial Sequence:  Hypothetical Probe Sequence
tgtcgcaatcgtgcttgatgccat

SEQ ID NO: 744 - DNA, 24 bp, Artificial Sequence
  Description of Artificial Sequence:  Hypothetical Probe Sequence
tgtcgcaagagttgcgcacgatcg

SEQ ID NO: 745 - DNA, 24 bp, Artificial Sequence
  Description of Artificial Sequence:  Hypothetical Probe Sequence
tgtcgcaaagtggtctgtgccgaa

SEQ ID NO: 746 - DNA, 24 bp, Artificial Sequence
  Description of Artificial Sequence:  Hypothetical Probe Sequence
tgtcgcaatgcggacccctatcgt

SEQ ID NO: 747 - DNA, 24 bp, Artificial Sequence
  Description of Artificial Sequence:  Hypothetical Probe Sequence
tgtcagtgcagcagccggactgcg

SEQ ID NO: 748 - DNA, 24 bp, Artificial Sequence
  Description of Artificial Sequence:  Hypothetical Probe Sequence
tgtcacctcacgcgaaacggcgtt

SEQ ID NO: 749 - DNA, 24 bp, Artificial Sequence
  Description of Artificial Sequence:  Hypothetical Probe Sequence
tgtcatcgtcgtcagcgcaaagcc

SEQ ID NO: 750 - DNA, 24 bp, Artificial Sequence
  Description of Artificial Sequence:  Hypothetical Probe Sequence
tgtcatcggatggcaaacgggtgc

SEQ ID NO: 751 - DNA, 24 bp, Artificial Sequence
  Description of Artificial Sequence:  Hypothetical Probe Sequence
tgtcatcgtgcgcagcgtgcaatc

SEQ ID NO: 752 - DNA, 24 bp, Artificial Sequence
  Description of Artificial Sequence:  Hypothetical Probe Sequence
tgtccctacagcagcccagcgtgc

SEQ ID NO: 753 - DNA, 24 bp, Artificial Sequence
  Description of Artificial Sequence:  Hypothetical Probe Sequence
tgtccctaacgggacctgcggtct

SEQ ID NO: 754 - DNA, 24 bp, Artificial Sequence
  Description of Artificial Sequence:  Hypothetical Probe Sequence
tgtcgatggtgcccatcttgccat

SEQ ID NO: 755 - DNA, 24 bp, Artificial Sequence
  Description of Artificial Sequence:  Hypothetical Probe Sequence
tgtcgatgggacgatgcgtttccc

SEQ ID NO: 756 - DNA, 24 bp, Artificial Sequence
  Description of Artificial Sequence:  Hypothetical Probe Sequence
tgtctccccgttaggattgatgcg

SEQ ID NO: 757 - DNA, 24 bp, Artificial Sequence
  Description of Artificial Sequence:  Hypothetical Probe Sequence
tgtctcccaggaggacgaccgctt

SEQ ID NO: 758 - DNA, 24 bp, Artificial Sequence
  Description of Artificial Sequence:  Hypothetical Probe Sequence
tgtctgcgttgaacgggaccacct

SEQ ID NO: 759 - DNA, 24 bp, Artificial Sequence
  Description of Artificial Sequence:  Hypothetical Probe Sequence
tgtctgcgaatcgacccagcccat

SEQ ID NO: 760 - DNA, 24 bp, Artificial Sequence
  Description of Artificial Sequence:  Hypothetical Probe Sequence
tgtctgcgaaagcagccttggctt

SEQ ID NO: 761 - DNA, 24 bp, Artificial Sequence
  Description of Artificial Sequence:  Hypothetical Probe Sequence
tgtctgcgggtacgaacctaacgg

SEQ ID NO: 762 - DNA, 24 bp, Artificial Sequence
  Description of Artificial Sequence:  Hypothetical Probe Sequence
tgtctgcgagtggcaatgcggcaa

SEQ ID NO: 763 - DNA, 24 bp, Artificial Sequence
  Description of Artificial Sequence:  Hypothetical Probe Sequence
tgtctgcgaggacgaacacgacct

SEQ ID NO: 764 - DNA, 24 bp, Artificial Sequence
  Description of Artificial Sequence:  Hypothetical Probe Sequence
tgtctgcgtgcggtgccctatgat

SEQ ID NO: 765 - DNA, 24 bp, Artificial Sequence
  Description of Artificial Sequence:  Hypothetical Probe Sequence
tgtctgcggtgccagctctggtgc

SEQ ID NO: 766 - DNA, 24 bp, Artificial Sequence
  Description of Artificial Sequence:  Hypothetical Probe Sequence
tgtccacgtcgtgacccttgccat

SEQ ID NO: 767 - DNA, 24 bp, Artificial Sequence
  Description of Artificial Sequence:  Hypothetical Probe Sequence
tgtccacgcttggacccacgttga

SEQ ID NO: 768 - DNA, 24 bp, Artificial Sequence
  Description of Artificial Sequence:  Hypothetical Probe Sequence
tgtccacggcttcctagcaacgaa

SEQ ID NO: 769 - DNA, 24 bp, Artificial Sequence
  Description of Artificial Sequence:  Hypothetical Probe Sequence
tgtccacgggtactgtcacgacgg

SEQ ID NO: 770 - DNA, 24 bp, Artificial Sequence
  Description of Artificial Sequence:  Hypothetical Probe Sequence
tgtccacggacctcgtgcttggta

SEQ ID NO: 771 - DNA, 24 bp, Artificial Sequence
  Description of Artificial Sequence:  Hypothetical Probe Sequence
tgtccagcaccttcgtacggtccc

SEQ ID NO: 772 - DNA, 24 bp, Artificial Sequence
  Description of Artificial Sequence:  Hypothetical Probe Sequence
tgtccagcgaccttgaggaccagc

SEQ ID NO: 773 - DNA, 24 bp, Artificial Sequence
  Description of Artificial Sequence:  Hypothetical Probe Sequence
tgtcgaccaatctcccgtgccttg

SEQ ID NO: 774 - DNA, 24 bp, Artificial Sequence
  Description of Artificial Sequence:  Hypothetical Probe Sequence
tgtcgaccaggactcatgcggcaa

SEQ ID NO: 775 - DNA, 24 bp, Artificial Sequence
  Description of Artificial Sequence:  Hypothetical Probe Sequence
tgtcgtgcaatcaatccacgccat

SEQ ID NO: 776 - DNA, 24 bp, Artificial Sequence
  Description of Artificial Sequence:  Hypothetical Probe Sequence
tgtcgtgctcgtgcaagaccgtct

SEQ ID NO: 777 - DNA, 24 bp, Artificial Sequence
  Description of Artificial Sequence:  Hypothetical Probe Sequence
tgtcgtgccttgctgtcacgcacg

SEQ ID NO: 778 - DNA, 24 bp, Artificial Sequence
  Description of Artificial Sequence:  Hypothetical Probe Sequence
tgtcgtgcggtatctggcaaagga

SEQ ID NO: 779 - DNA, 24 bp, Artificial Sequence
  Description of Artificial Sequence:  Hypothetical Probe Sequence
tgtcgtgcgtcttctgggacggac

SEQ ID NO: 780 - DNA, 24 bp, Artificial Sequence
  Description of Artificial Sequence:  Hypothetical Probe Sequence
tgtcgtgcacctacctgtgcggta

SEQ ID NO: 781 - DNA, 24 bp, Artificial Sequence
  Description of Artificial Sequence:  Hypothetical Probe Sequence
tgtcgtgcaggactgtcgaaacgg

SEQ ID NO: 782 - DNA, 24 bp, Artificial Sequence
  Description of Artificial Sequence:  Hypothetical Probe Sequence
tgtcgtgctccccgaaaatcctgt

SEQ ID NO: 783 - DNA, 24 bp, Artificial Sequence
  Description of Artificial Sequence:  Hypothetical Probe Sequence
tgtcggacctgtgcttagcccttg

SEQ ID NO: 784 - DNA, 24 bp, Artificial Sequence
  Description of Artificial Sequence:  Hypothetical Probe Sequence
tgtcggacgtctggtaagccgctt

SEQ ID NO: 785 - DNA, 24 bp, Artificial Sequence
  Description of Artificial Sequence:  Hypothetical Probe Sequence
tgtcggacacctcgttacggcttg

SEQ ID NO: 786 - DNA, 24 bp, Artificial Sequence
  Description of Artificial Sequence:  Hypothetical Probe Sequence
tgtcggaccctaaatcgcttcgtt

SEQ ID NO: 787 - DNA, 24 bp, Artificial Sequence
  Description of Artificial Sequence:  Hypothetical Probe Sequence
tgtcggacgatgagtgcctaagcc

SEQ ID NO: 788 - DNA, 24 bp, Artificial Sequence
  Description of Artificial Sequence:  Hypothetical Probe Sequence
tgtcggactcccgaccagtggtgc

SEQ ID NO: 789 - DNA, 24 bp, Artificial Sequence
  Description of Artificial Sequence:  Hypothetical Probe Sequence
tgtcacggttgatcccacggacct

SEQ ID NO: 790 - DNA, 24 bp, Artificial Sequence
  Description of Artificial Sequence:  Hypothetical Probe Sequence
tgtcacggcttgcgttgcaaagtg

SEQ ID NO: 791 - DNA, 24 bp, Artificial Sequence
  Description of Artificial Sequence:  Hypothetical Probe Sequence
tgtcacgggcttacctgatgccat

SEQ ID NO: 792 - DNA, 24 bp, Artificial Sequence
  Description of Artificial Sequence:  Hypothetical Probe Sequence
tgtcacgggagtaggacgtttgcg

SEQ ID NO: 793 - DNA, 24 bp, Artificial Sequence
  Description of Artificial Sequence:  Hypothetical Probe Sequence
tgtcacgggcaaaaagcgaaaaag

SEQ ID NO: 794 - DNA, 24 bp, Artificial Sequence
  Description of Artificial Sequence:  Hypothetical Probe Sequence
tgtcacggtccccttgggacagga

SEQ ID NO: 795 - DNA, 24 bp, Artificial Sequence
  Description of Artificial Sequence:  Hypothetical Probe Sequence
tgtcagccctgtataccgaatgcg

SEQ ID NO: 796 - DNA, 24 bp, Artificial Sequence
  Description of Artificial Sequence:  Hypothetical Probe Sequence
tgtcagccgcttttgacgtttcgt

SEQ ID NO: 797 - DNA, 24 bp, Artificial Sequence
  Description of Artificial Sequence:  Hypothetical Probe Sequence
tgtcagccacctgcaagatggctt

SEQ ID NO: 798 - DNA, 24 bp, Artificial Sequence
  Description of Artificial Sequence:  Hypothetical Probe Sequence
tgtcagccatcgttagcagccagc

SEQ ID NO: 799 - DNA, 24 bp, Artificial Sequence
  Description of Artificial Sequence:  Hypothetical Probe Sequence
tgtcagccgaccgctttcgttctg

SEQ ID NO: 800 - DNA, 24 bp, Artificial Sequence
  Description of Artificial Sequence:  Hypothetical Probe Sequence
tcgttgatgcttcttggtgcgctt

SEQ ID NO: 801 - DNA, 24 bp, Artificial Sequence
  Description of Artificial Sequence:  Hypothetical Probe Sequence
tcgtttagggacagccagccacgg

SEQ ID NO: 802 - DNA, 24 bp, Artificial Sequence
  Description of Artificial Sequence:  Hypothetical Probe Sequence
tcgtaatccacgcgttggtaacgg

SEQ ID NO: 803 - DNA, 24 bp, Artificial Sequence
  Description of Artificial Sequence:  Hypothetical Probe Sequence
tcgtaaagggacaggatccctgcg

SEQ ID NO: 804 - DNA, 24 bp, Artificial Sequence
  Description of Artificial Sequence:  Hypothetical Probe Sequence
tcgtaaagagccaaagcacgccat

SEQ ID NO: 805 - DNA, 24 bp, Artificial Sequence
  Description of Artificial Sequence:  Hypothetical Probe Sequence
tcgttctgtgcgcgaagtgcttga

SEQ ID NO: 806 - DNA, 24 bp, Artificial Sequence
  Description of Artificial Sequence:  Hypothetical Probe Sequence
tcgttctgcacgatacgaccgctt

SEQ ID NO: 807 - DNA, 24 bp, Artificial Sequence
  Description of Artificial Sequence:  Hypothetical Probe Sequence
tcgttgtccgttgagttgcgagga

SEQ ID NO: 808 - DNA, 24 bp, Artificial Sequence
  Description of Artificial Sequence:  Hypothetical Probe Sequence
tcgttgtcctcaacggtgcggctt

SEQ ID NO: 809 - DNA, 24 bp, Artificial Sequence
  Description of Artificial Sequence:  Hypothetical Probe Sequence
tcgttgtcgagttgcgcttggacc

SEQ ID NO: 810 - DNA, 24 bp, Artificial Sequence
  Description of Artificial Sequence:  Hypothetical Probe Sequence
tcgttgtccacgagcccgttacct

SEQ ID NO: 811 - DNA, 24 bp, Artificial Sequence
  Description of Artificial Sequence:  Hypothetical Probe Sequence
tcgttgtcacggtcgtgcaaagga

SEQ ID NO: 812 - DNA, 24 bp, Artificial Sequence
  Description of Artificial Sequence:  Hypothetical Probe Sequence
tcgttcgtggtatgcgcctaatcg

SEQ ID NO: 813 - DNA, 24 bp, Artificial Sequence
  Description of Artificial Sequence:  Hypothetical Probe Sequence
tcgttcgttgcgatcgtacatgcg

SEQ ID NO: 814 - DNA, 24 bp, Artificial Sequence
  Description of Artificial Sequence:  Hypothetical Probe Sequence
tcgtcttgcgttcttgcttgcagc

SEQ ID NO: 815 - DNA, 24 bp, Artificial Sequence
  Description of Artificial Sequence:  Hypothetical Probe Sequence
tcgtcttgtcccggactcccgagt

SEQ ID NO: 816 - DNA, 24 bp, Artificial Sequence
  Description of Artificial Sequence:  Hypothetical Probe Sequence
tcgtcttggaccagccacctgacc

SEQ ID NO: 817 - DNA, 24 bp, Artificial Sequence
  Description of Artificial Sequence:  Hypothetical Probe Sequence
tcgtcttgagccagccatacacgg

SEQ ID NO: 818 - DNA, 24 bp, Artificial Sequence
  Description of Artificial Sequence:  Hypothetical Probe Sequence
tcgtcgtttgatgcaacagcgtgc

SEQ ID NO: 819 - DNA, 24 bp, Artificial Sequence
  Description of Artificial Sequence:  Hypothetical Probe Sequence
tcgtcgtttgtcaatcgtgcgtgc

SEQ ID NO: 820 - DNA, 24 bp, Artificial Sequence
  Description of Artificial Sequence:  Hypothetical Probe Sequence
tcgtcgttcgaaggtagcaatgcg

SEQ ID NO: 821 - DNA, 24 bp, Artificial Sequence
  Description of Artificial Sequence:  Hypothetical Probe Sequence
tcgtcgttacctcgttcgaatgcg

SEQ ID NO: 822 - DNA, 24 bp, Artificial Sequence
  Description of Artificial Sequence:  Hypothetical Probe Sequence
tcgtcgttgacccacgcacgagtg

SEQ ID NO: 823 - DNA, 24 bp, Artificial Sequence
  Description of Artificial Sequence:  Hypothetical Probe Sequence
tcgtcgttagccagccttgaccat

SEQ ID NO: 824 - DNA, 24 bp, Artificial Sequence
  Description of Artificial Sequence:  Hypothetical Probe Sequence
tcgtctcacagcgtgccgttcgtt

SEQ ID NO: 825 - DNA, 24 bp, Artificial Sequence
  Description of Artificial Sequence:  Hypothetical Probe Sequence
tcgtctcaagccttaggtgccacg

SEQ ID NO: 826 - DNA, 24 bp, Artificial Sequence
  Description of Artificial Sequence:  Hypothetical Probe Sequence
tcgtctgtagcccagctgcggctt

SEQ ID NO: 827 - DNA, 24 bp, Artificial Sequence
  Description of Artificial Sequence:  Hypothetical Probe Sequence
tcgtccatctcaagccccatgcaa

SEQ ID NO: 828 - DNA, 24 bp, Artificial Sequence
  Description of Artificial Sequence:  Hypothetical Probe Sequence
tcgtccatcagcggtaacgggacc

SEQ ID NO: 829 - DNA, 24 bp, Artificial Sequence
  Description of Artificial Sequence:  Hypothetical Probe Sequence
tcgtccatgacccacgcttgcttg

SEQ ID NO: 830 - DNA, 24 bp, Artificial Sequence
  Description of Artificial Sequence:  Hypothetical Probe Sequence
tcgtcgaaaatcacggtgtcgctt

SEQ ID NO: 831 - DNA, 24 bp, Artificial Sequence
  Description of Artificial Sequence:  Hypothetical Probe Sequence
tcgtcgaaaaaggaccacggagga

SEQ ID NO: 832 - DNA, 24 bp, Artificial Sequence
  Description of Artificial Sequence:  Hypothetical Probe Sequence
tcgtcgaatctgtgcgggaccacg

SEQ ID NO: 833 - DNA, 24 bp, Artificial Sequence
  Description of Artificial Sequence:  Hypothetical Probe Sequence
tcgtcgaaaccttcccggacctgt

SEQ ID NO: 834 - DNA, 24 bp, Artificial Sequence
  Description of Artificial Sequence:  Hypothetical Probe Sequence
tcgtcgaaaggaatcggatggatg

SEQ ID NO: 835 - DNA, 24 bp, Artificial Sequence
  Description of Artificial Sequence:  Hypothetical Probe Sequence
tcgtcgaagtgcgcaatcccagtg

SEQ ID NO: 836 - DNA, 24 bp, Artificial Sequence
  Description of Artificial Sequence:  Hypothetical Probe Sequence
tcgtgcttctcagacctgcgagga

SEQ ID NO: 837 - DNA, 24 bp, Artificial Sequence
  Description of Artificial Sequence:  Hypothetical Probe Sequence
tcgtggtaagcccacggagtcagc

SEQ ID NO: 838 - DNA, 24 bp, Artificial Sequence
  Description of Artificial Sequence:  Hypothetical Probe Sequence
tcgtgtctcgtttcccacggagcc

SEQ ID NO: 839 - DNA, 24 bp, Artificial Sequence
  Description of Artificial Sequence:  Hypothetical Probe Sequence
tcgtgtctgcaaagccagccgtgc

SEQ ID NO: 840 - DNA, 24 bp, Artificial Sequence
  Description of Artificial Sequence:  Hypothetical Probe Sequence
tcgtgtctgtgcatcgtgcgggac

SEQ ID NO: 841 - DNA, 24 bp, Artificial Sequence
  Description of Artificial Sequence:  Hypothetical Probe Sequence
tcgtgagttcgtcagcggacgacc

SEQ ID NO: 842 - DNA, 24 bp, Artificial Sequence
  Description of Artificial Sequence:  Hypothetical Probe Sequence
tcgtgagtccattgcggtcttccc

SEQ ID NO: 843 - DNA, 24 bp, Artificial Sequence
  Description of Artificial Sequence:  Hypothetical Probe Sequence
tcgtgcaattgatgtcgtgcatcg

SEQ ID NO: 844 - DNA, 24 bp, Artificial Sequence
  Description of Artificial Sequence:  Hypothetical Probe Sequence
tcgtgcaagcttcttggatggacc

SEQ ID NO: 845 - DNA, 24 bp, Artificial Sequence
  Description of Artificial Sequence:  Hypothetical Probe Sequence
tcgtgcaatgcggtgctcgttctg

SEQ ID NO: 846 - DNA, 24 bp, Artificial Sequence
  Description of Artificial Sequence:  Hypothetical Probe Sequence
tcgtgcaaggacagcctcgttgat

SEQ ID NO: 847 - DNA, 24 bp, Artificial Sequence
  Description of Artificial Sequence:  Hypothetical Probe Sequence
tcgtagtgtgcgggtaacgggtgc

SEQ ID NO: 848 - DNA, 24 bp, Artificial Sequence
  Description of Artificial Sequence:  Hypothetical Probe Sequence
tcgtagtggtgcgatggtgcgtgc

SEQ ID NO: 849 - DNA, 24 bp, Artificial Sequence
  Description of Artificial Sequence:  Hypothetical Probe Sequence
tcgtacctcagcacggacggggac

SEQ ID NO: 850 - DNA, 24 bp, Artificial Sequence
  Description of Artificial Sequence:  Hypothetical Probe Sequence
tcgtatcggcttatcgcacgtgtc

SEQ ID NO: 851 - DNA, 24 bp, Artificial Sequence
  Description of Artificial Sequence:  Hypothetical Probe Sequence
tcgtatcgggacgacctcccagga

SEQ ID NO: 852 - DNA, 24 bp, Artificial Sequence
  Description of Artificial Sequence:  Hypothetical Probe Sequence
tcgtaggagacctctgagccagcc

SEQ ID NO: 853 - DNA, 24 bp, Artificial Sequence
  Description of Artificial Sequence:  Hypothetical Probe Sequence
tcgtaggaagccccatccatgtgc

SEQ ID NO: 854 - DNA, 24 bp, Artificial Sequence
  Description of Artificial Sequence:  Hypothetical Probe Sequence
tcgtcctaaaagtgcgtgcgagcc

SEQ ID NO: 855 - DNA, 24 bp, Artificial Sequence
  Description of Artificial Sequence:  Hypothetical Probe Sequence
tcgtgatgagccgcaacagcctca

SEQ ID NO: 856 - DNA, 24 bp, Artificial Sequence
  Description of Artificial Sequence:  Hypothetical Probe Sequence
tcgttcccctgtttagcgaaagga

SEQ ID NO: 857 - DNA, 24 bp, Artificial Sequence
  Description of Artificial Sequence:  Hypothetical Probe Sequence
tcgttcccccataaaggtgcacct

SEQ ID NO: 858 - DNA, 24 bp, Artificial Sequence
  Description of Artificial Sequence:  Hypothetical Probe Sequence
tcgttcccgtctgcaacctagcaa

SEQ ID NO: 859 - DNA, 24 bp, Artificial Sequence
  Description of Artificial Sequence:  Hypothetical Probe Sequence
tcgttcccgagtccatcttggcaa

SEQ ID NO: 860 - DNA, 24 bp, Artificial Sequence
  Description of Artificial Sequence:  Hypothetical Probe Sequence
tcgttccctgcgtcgtacggtctg

SEQ ID NO: 861 - DNA, 24 bp, Artificial Sequence
  Description of Artificial Sequence:  Hypothetical Probe Sequence
tcgttcccggactgtcgtgcctgt

SEQ ID NO: 862 - DNA, 24 bp, Artificial Sequence
  Description of Artificial Sequence:  Hypothetical Probe Sequence
tcgttgcgaatcaatcgcaaccat

SEQ ID NO: 863 - DNA, 24 bp, Artificial Sequence
  Description of Artificial Sequence:  Hypothetical Probe Sequence
tcgttgcgtcgtagtggagttgcg

SEQ ID NO: 864 - DNA, 24 bp, Artificial Sequence
  Description of Artificial Sequence:  Hypothetical Probe Sequence
tcgttgcgctcattgatgcgaatc

SEQ ID NO: 865 - DNA, 24 bp, Artificial Sequence
  Description of Artificial Sequence:  Hypothetical Probe Sequence
tcgttgcggagtggtagacccacg

SEQ ID NO: 866 - DNA, 24 bp, Artificial Sequence
  Description of Artificial Sequence:  Hypothetical Probe Sequence
tcgttgcgagtgaaagcgaattga

SEQ ID NO: 867 - DNA, 24 bp, Artificial Sequence
  Description of Artificial Sequence:  Hypothetical Probe Sequence
tcgttgcggatgggtaggacagcc

SEQ ID NO: 868 - DNA, 24 bp, Artificial Sequence
  Description of Artificial Sequence:  Hypothetical Probe Sequence
tcgttgcgcagctgtccacgtctg

SEQ ID NO: 869 - DNA, 24 bp, Artificial Sequence
  Description of Artificial Sequence:  Hypothetical Probe Sequence
tcgttgcggaccaaaggtgcagtg

SEQ ID NO: 870 - DNA, 24 bp, Artificial Sequence
  Description of Artificial Sequence:  Hypothetical Probe Sequence
tcgttgcgagccaatctcgtagcc

SEQ ID NO: 871 - DNA, 24 bp, Artificial Sequence
  Description of Artificial Sequence:  Hypothetical Probe Sequence
tcgtcacgaaagatacacggcagc

SEQ ID NO: 872 - DNA, 24 bp, Artificial Sequence
  Description of Artificial Sequence:  Hypothetical Probe Sequence
tcgtcacgtctgtccctgcgagcc

SEQ ID NO: 873 - DNA, 24 bp, Artificial Sequence
  Description of Artificial Sequence:  Hypothetical Probe Sequence
tcgtcacgcttgctcacagctccc

SEQ ID NO: 874 - DNA, 24 bp, Artificial Sequence
  Description of Artificial Sequence:  Hypothetical Probe Sequence
tcgtcacgcgtttctgggtagcaa

SEQ ID NO: 875 - DNA, 24 bp, Artificial Sequence
  Description of Artificial Sequence:  Hypothetical Probe Sequence
tcgtcacgctgtagcccctaggac

SEQ ID NO: 876 - DNA, 24 bp, Artificial Sequence
  Description of Artificial Sequence:  Hypothetical Probe Sequence
tcgtcacgccatgatggatgcttg

SEQ ID NO: 877 - DNA, 24 bp, Artificial Sequence
  Description of Artificial Sequence:  Hypothetical Probe Sequence
tcgtcacggcaatacagaccggac

SEQ ID NO: 878 - DNA, 24 bp, Artificial Sequence
  Description of Artificial Sequence:  Hypothetical Probe Sequence
tcgtcacgagtgaaaggcttgtgc

SEQ ID NO: 879 - DNA, 24 bp, Artificial Sequence
  Description of Artificial Sequence:  Hypothetical Probe Sequence
tcgtcacgatcgtctgacggccta

SEQ ID NO: 880 - DNA, 24 bp, Artificial Sequence
  Description of Artificial Sequence:  Hypothetical Probe Sequence
tcgtcacgacgggatgacggtcgt

SEQ ID NO: 881 - DNA, 24 bp, Artificial Sequence
  Description of Artificial Sequence:  Hypothetical Probe Sequence
tcgtcagcctcatgtcagccgtct

SEQ ID NO: 882 - DNA, 24 bp, Artificial Sequence
  Description of Artificial Sequence:  Hypothetical Probe Sequence
tcgtcagcccatgacctgtcagcc

SEQ ID NO: 883 - DNA, 24 bp, Artificial Sequence
  Description of Artificial Sequence:  Hypothetical Probe Sequence
tcgtcagcggtattgaggaccgtt

SEQ ID NO: 884 - DNA, 24 bp, Artificial Sequence
  Description of Artificial Sequence:  Hypothetical Probe Sequence
tcgtcagcgagtagtgcagcgtgc

SEQ ID NO: 885 - DNA, 24 bp, Artificial Sequence
  Description of Artificial Sequence:  Hypothetical Probe Sequence
tcgtcagcgaccgagttcgttccc

SEQ ID NO: 886 - DNA, 24 bp, Artificial Sequence
  Description of Artificial Sequence:  Hypothetical Probe Sequence
tcgtgaccaatccgttggactgcg

SEQ ID NO: 887 - DNA, 24 bp, Artificial Sequence
  Description of Artificial Sequence:  Hypothetical Probe Sequence
tcgtgaccaaagcttgagccgtgc

SEQ ID NO: 888 - DNA, 24 bp, Artificial Sequence
  Description of Artificial Sequence:  Hypothetical Probe Sequence
tcgtgacccgttaccttctgacgg

SEQ ID NO: 889 - DNA, 24 bp, Artificial Sequence
  Description of Artificial Sequence:  Hypothetical Probe Sequence
tcgtgaccctgtttgaagccgctt

SEQ ID NO: 890 - DNA, 24 bp, Artificial Sequence
  Description of Artificial Sequence:  Hypothetical Probe Sequence
tcgtgaccgcttccatgagttccc

SEQ ID NO: 891 - DNA, 24 bp, Artificial Sequence
  Description of Artificial Sequence:  Hypothetical Probe Sequence
tcgtgaccgtctggacgtgcgacc

SEQ ID NO: 892 - DNA, 24 bp, Artificial Sequence
  Description of Artificial Sequence:  Hypothetical Probe Sequence
tcgtgaccatcgtcgtaggatgcg

SEQ ID NO: 893 - DNA, 24 bp, Artificial Sequence
  Description of Artificial Sequence:  Hypothetical Probe Sequence
tcgtgtgcaatctctgccatcagc

SEQ ID NO: 894 - DNA, 24 bp, Artificial Sequence
  Description of Artificial Sequence:  Hypothetical Probe Sequence
tcgtgtgctctgccatagccgcaa

SEQ ID NO: 895 - DNA, 24 bp, Artificial Sequence
  Description of Artificial Sequence:  Hypothetical Probe Sequence
tcgtgtgctgtcgcaatcccgatg

SEQ ID NO: 896 - DNA, 24 bp, Artificial Sequence
  Description of Artificial Sequence:  Hypothetical Probe Sequence
tcgtgtgccttgataccacgcagc

SEQ ID NO: 897 - DNA, 24 bp, Artificial Sequence
  Description of Artificial Sequence:  Hypothetical Probe Sequence
tcgtgtgcctgtgcttccatatcg

SEQ ID NO: 898 - DNA, 24 bp, Artificial Sequence
  Description of Artificial Sequence:  Hypothetical Probe Sequence
tcgtgtgcggtaacctacggacgg

SEQ ID NO: 899 - DNA, 24 bp, Artificial Sequence
  Description of Artificial Sequence:  Hypothetical Probe Sequence
tcgtgtgcgtctggacagtgcgtt

SEQ ID NO: 900 - DNA, 24 bp, Artificial Sequence
  Description of Artificial Sequence:  Hypothetical Probe Sequence
tcgtgtgcgagtcacgaggagtgc

SEQ ID NO: 901 - DNA, 24 bp, Artificial Sequence
  Description of Artificial Sequence:  Hypothetical Probe Sequence
tcgtgtgcgcaaaaagagcctctg

SEQ ID NO: 902 - DNA, 24 bp, Artificial Sequence
  Description of Artificial Sequence:  Hypothetical Probe Sequence
tcgtggacttgatccctgcgcgtt

SEQ ID NO: 903 - DNA, 24 bp, Artificial Sequence
  Description of Artificial Sequence:  Hypothetical Probe Sequence
tcgtggacaatccagcgacccgtt

SEQ ID NO: 904 - DNA, 24 bp, Artificial Sequence
  Description of Artificial Sequence:  Hypothetical Probe Sequence
tcgtggacaaaggcaagtgccgaa

SEQ ID NO: 905 - DNA, 24 bp, Artificial Sequence
  Description of Artificial Sequence:  Hypothetical Probe Sequence
tcgtggaccttggaccgtctacgg

SEQ ID NO: 906 - DNA, 24 bp, Artificial Sequence
  Description of Artificial Sequence:  Hypothetical Probe Sequence
tcgtggacctgttgcgcctaaaag

SEQ ID NO: 907 - DNA, 24 bp, Artificial Sequence
  Description of Artificial Sequence:  Hypothetical Probe Sequence
tcgtggacgagttctggtgcgacc

SEQ ID NO: 908 - DNA, 24 bp, Artificial Sequence
  Description of Artificial Sequence:  Hypothetical Probe Sequence
tcgtggacgatgcctacagcccat

SEQ ID NO: 909 - DNA, 24 bp, Artificial Sequence
  Description of Artificial Sequence:  Hypothetical Probe Sequence
tcgtggactccctcccatacagcc

SEQ ID NO: 910 - DNA, 24 bp, Artificial Sequence
  Description of Artificial Sequence:  Hypothetical Probe Sequence
tcgtggactgcggtgcctcagacc

SEQ ID NO: 911 - DNA, 24 bp, Artificial Sequence
  Description of Artificial Sequence:  Hypothetical Probe Sequence
tcgtggaccacgttagatcggcaa

SEQ ID NO: 912 - DNA, 24 bp, Artificial Sequence
  Description of Artificial Sequence:  Hypothetical Probe Sequence
tcgtggacagccccatagtgcgaa

SEQ ID NO: 913 - DNA, 24 bp, Artificial Sequence
  Description of Artificial Sequence:  Hypothetical Probe Sequence
tcgtacggtcgttctgatcgcgtt

SEQ ID NO: 914 - DNA, 24 bp, Artificial Sequence
  Description of Artificial Sequence:  Hypothetical Probe Sequence
tcgtacggccatggtatcgtgcaa

SEQ ID NO: 915 - DNA, 24 bp, Artificial Sequence
  Description of Artificial Sequence:  Hypothetical Probe Sequence
tcgtacggcctaatcgctcaatcg

SEQ ID NO: 916 - DNA, 24 bp, Artificial Sequence
  Description of Artificial Sequence:  Hypothetical Probe Sequence
tcgtagccttgacagcgcaaccta

SEQ ID NO: 917 - DNA, 24 bp, Artificial Sequence
  Description of Artificial Sequence:  Hypothetical Probe Sequence
tcgtagcctgtcggtaagcctgcg

SEQ ID NO: 918 - DNA, 24 bp, Artificial Sequence
  Description of Artificial Sequence:  Hypothetical Probe Sequence
tcgtagcctcgtaggactgttgcg

SEQ ID NO: 919 - DNA, 24 bp, Artificial Sequence
  Description of Artificial Sequence:  Hypothetical Probe Sequence
tcgtagcccgtttctgttgatgcg

SEQ ID NO: 920 - DNA, 24 bp, Artificial Sequence
  Description of Artificial Sequence:  Hypothetical Probe Sequence
tcgtagccccatgagtgaccccat

SEQ ID NO: 921 - DNA, 24 bp, Artificial Sequence
  Description of Artificial Sequence:  Hypothetical Probe Sequence
tcgtagcctgcgatactccccacg

SEQ ID NO: 922 - DNA, 24 bp, Artificial Sequence
  Description of Artificial Sequence:  Hypothetical Probe Sequence
cttgttgaagccgaccggtaacgg

SEQ ID NO: 923 - DNA, 24 bp, Artificial Sequence
  Description of Artificial Sequence:  Hypothetical Probe Sequence
cttgaatcgaccacgggtgcacgg

SEQ ID NO: 924 - DNA, 24 bp, Artificial Sequence
  Description of Artificial Sequence:  Hypothetical Probe Sequence
cttgaaagtcccggaccgaatgcg

SEQ ID NO: 925 - DNA, 24 bp, Artificial Sequence
  Description of Artificial Sequence:  Hypothetical Probe Sequence
cttgtctgcacggacccctatgcg

SEQ ID NO: 926 - DNA, 24 bp, Artificial Sequence
  Description of Artificial Sequence:  Hypothetical Probe Sequence
cttgcttgacctgcaaacggttga

SEQ ID NO: 927 - DNA, 24 bp, Artificial Sequence
  Description of Artificial Sequence:  Hypothetical Probe Sequence
cttgcttgatcgttagtgcgacgg

SEQ ID NO: 928 - DNA, 24 bp, Artificial Sequence
  Description of Artificial Sequence:  Hypothetical Probe Sequence
cttgcttgcctacttgcacggcaa

SEQ ID NO: 929 - DNA, 24 bp, Artificial Sequence
  Description of Artificial Sequence:  Hypothetical Probe Sequence
cttgcttggatgggacatcgcgaa

SEQ ID NO: 930 - DNA, 24 bp, Artificial Sequence
  Description of Artificial Sequence:  Hypothetical Probe Sequence
cttgcgttttgaagccggtaacgg

SEQ ID NO: 931 - DNA, 24 bp, Artificial Sequence
  Description of Artificial Sequence:  Hypothetical Probe Sequence
cttgcgttaccttgcggaccacct

SEQ ID NO: 932 - DNA, 24 bp, Artificial Sequence
  Description of Artificial Sequence:  Hypothetical Probe Sequence
cttgctcacacgggacaggaagcc

SEQ ID NO: 933 - DNA, 24 bp, Artificial Sequence
  Description of Artificial Sequence:  Hypothetical Probe Sequence
cttgctcagtgccagcgaccacgg

SEQ ID NO: 934 - DNA, 24 bp, Artificial Sequence
  Description of Artificial Sequence:  Hypothetical Probe Sequence
cttgctgtgcaagtgccgttacgg

SEQ ID NO: 935 - DNA, 24 bp, Artificial Sequence
  Description of Artificial Sequence:  Hypothetical Probe Sequence
cttgccatccatcacggcaaccat

SEQ ID NO: 936 - DNA, 24 bp, Artificial Sequence
  Description of Artificial Sequence:  Hypothetical Probe Sequence
cttgccatgcttagtggtgcagcc

SEQ ID NO: 937 - DNA, 24 bp, Artificial Sequence
  Description of Artificial Sequence:  Hypothetical Probe Sequence
cttgcgaattgaatcggtgcccta

SEQ ID NO: 938 - DNA, 24 bp, Artificial Sequence
  Description of Artificial Sequence:  Hypothetical Probe Sequence
cttgcgaagcttcctaggacgctt

SEQ ID NO: 939 - DNA, 24 bp, Artificial Sequence
  Description of Artificial Sequence:  Hypothetical Probe Sequence
cttggcttccatcacgtcccagtg

SEQ ID NO: 940 - DNA, 24 bp, Artificial Sequence
  Description of Artificial Sequence:  Hypothetical Probe Sequence
cttggcttgtcttcccgaccggac

SEQ ID NO: 941 - DNA, 24 bp, Artificial Sequence
  Description of Artificial Sequence:  Hypothetical Probe Sequence
cttggcttcagcggacctgttccc

SEQ ID NO: 942 - DNA, 24 bp, Artificial Sequence
  Description of Artificial Sequence:  Hypothetical Probe Sequence
cttggcttgtgccttgcttggctt

SEQ ID NO: 943 - DNA, 24 bp, Artificial Sequence
  Description of Artificial Sequence:  Hypothetical Probe Sequence
cttggcttacggcgttagccagga

SEQ ID NO: 944 - DNA, 24 bp, Artificial Sequence
  Description of Artificial Sequence:  Hypothetical Probe Sequence
cttggtcttcgtcctatcccacgg

SEQ ID NO: 945 - DNA, 24 bp, Artificial Sequence
  Description of Artificial Sequence:  Hypothetical Probe Sequence
cttggtctcacggcaagacccagc

SEQ ID NO: 946 - DNA, 24 bp, Artificial Sequence
  Description of Artificial Sequence:  Hypothetical Probe Sequence
cttggcaagctttgattcccccat

SEQ ID NO: 947 - DNA, 24 bp, Artificial Sequence
  Description of Artificial Sequence:  Hypothetical Probe Sequence
cttggcaagagtggacaggatgcg

SEQ ID NO: 948 - DNA, 24 bp, Artificial Sequence
  Description of Artificial Sequence:  Hypothetical Probe Sequence
cttggcaaacctttagcacgcgtt

SEQ ID NO: 949 - DNA, 24 bp, Artificial Sequence
  Description of Artificial Sequence:  Hypothetical Probe Sequence
cttggcaaatcgaaaggatggctt

SEQ ID NO: 950 - DNA, 24 bp, Artificial Sequence
  Description of Artificial Sequence:  Hypothetical Probe Sequence
cttggcaaaggaagccctgttcgt

SEQ ID NO: 951 - DNA, 24 bp, Artificial Sequence
  Description of Artificial Sequence:  Hypothetical Probe Sequence
cttggcaagaccagccgtgcgacc

SEQ ID NO: 952 - DNA, 24 bp, Artificial Sequence
  Description of Artificial Sequence:  Hypothetical Probe Sequence
cttgagtgcgaagaccatcgacgg

SEQ ID NO: 953 - DNA, 24 bp, Artificial Sequence
  Description of Artificial Sequence:  Hypothetical Probe Sequence
cttgacctgtgcggacagcccgaa

SEQ ID NO: 954 - DNA, 24 bp, Artificial Sequence
  Description of Artificial Sequence:  Hypothetical Probe Sequence
cttgaggatgcgacctcagcggac

SEQ ID NO: 955 - DNA, 24 bp, Artificial Sequence
  Description of Artificial Sequence:  Hypothetical Probe Sequence
cttgaggacacgagcccagccgaa

SEQ ID NO: 956 - DNA, 24 bp, Artificial Sequence
  Description of Artificial Sequence:  Hypothetical Probe Sequence
cttgcctaatcgaggatgcggtct

SEQ ID NO: 957 - DNA, 24 bp, Artificial Sequence
  Description of Artificial Sequence:  Hypothetical Probe Sequence
cttgcctaacggtcccaatcctca

SEQ ID NO: 958 - DNA, 24 bp, Artificial Sequence
  Description of Artificial Sequence:  Hypothetical Probe Sequence
cttggatgtcgtgaccagcctctg

SEQ ID NO: 959 - DNA, 24 bp, Artificial Sequence
  Description of Artificial Sequence:  Hypothetical Probe Sequence
cttggatgcttgcagcagccccta

SEQ ID NO: 960 - DNA, 24 bp, Artificial Sequence
  Description of Artificial Sequence:  Hypothetical Probe Sequence
cttggatgcgttgcttgaccgagt

SEQ ID NO: 961 - DNA, 24 bp, Artificial Sequence
  Description of Artificial Sequence:  Hypothetical Probe Sequence
cttggatgctgttcgtcagccgaa

SEQ ID NO: 962 - DNA, 24 bp, Artificial Sequence
  Description of Artificial Sequence:  Hypothetical Probe Sequence
cttggatggcaaagccgagtgctt

SEQ ID NO: 963 - DNA, 24 bp, Artificial Sequence
  Description of Artificial Sequence:  Hypothetical Probe Sequence
cttgtcccctgtcttgagccccat

SEQ ID NO: 964 - DNA, 24 bp, Artificial Sequence
  Description of Artificial Sequence:  Hypothetical Probe Sequence
cttgtcccacgggcaattgaatcg

SEQ ID NO: 965 - DNA, 24 bp, Artificial Sequence
  Description of Artificial Sequence:  Hypothetical Probe Sequence
cttgtgcgtgtccagcgtgctccc

SEQ ID NO: 966 - DNA, 24 bp, Artificial Sequence
  Description of Artificial Sequence:  Hypothetical Probe Sequence
cttgtgcgtcgtttgacagccagc

SEQ ID NO: 967 - DNA, 24 bp, Artificial Sequence
  Description of Artificial Sequence:  Hypothetical Probe Sequence
cttgtgcgtgcgccattctgctgt

SEQ ID NO: 968 - DNA, 24 bp, Artificial Sequence
  Description of Artificial Sequence:  Hypothetical Probe Sequence
cttgtgcgcagcagtgcacgaatc

SEQ ID NO: 969 - DNA, 24 bp, Artificial Sequence
  Description of Artificial Sequence:  Hypothetical Probe Sequence
cttgcacgaatctctggaccgtgc

SEQ ID NO: 970 - DNA, 24 bp, Artificial Sequence
  Description of Artificial Sequence:  Hypothetical Probe Sequence
cttgcacgcttgttgagcaatcgt

SEQ ID NO: 971 - DNA, 24 bp, Artificial Sequence
  Description of Artificial Sequence:  Hypothetical Probe Sequence
cttgcacgagtggcaaagcccttg

SEQ ID NO: 972 - DNA, 24 bp, Artificial Sequence
  Description of Artificial Sequence:  Hypothetical Probe Sequence
cttgcacgaggacctacacgccat

SEQ ID NO: 973 - DNA, 24 bp, Artificial Sequence
  Description of Artificial Sequence:  Hypothetical Probe Sequence
cttgcagctgatacgggcaaggac

SEQ ID NO: 974 - DNA, 24 bp, Artificial Sequence
  Description of Artificial Sequence:  Hypothetical Probe Sequence
cttgcagcaatcgtgcatcgagcc

SEQ ID NO: 975 - DNA, 24 bp, Artificial Sequence
  Description of Artificial Sequence:  Hypothetical Probe Sequence
cttgcagcctcaggtatcccccat

SEQ ID NO: 976 - DNA, 24 bp, Artificial Sequence
  Description of Artificial Sequence:  Hypothetical Probe Sequence
cttgcagcggtaatcgtgcgtgtc

SEQ ID NO: 977 - DNA, 24 bp, Artificial Sequence
  Description of Artificial Sequence:  Hypothetical Probe Sequence
cttgcagcgtctaaagacggctca

SEQ ID NO: 978 - DNA, 24 bp, Artificial Sequence
  Description of Artificial Sequence:  Hypothetical Probe Sequence
cttgcagcgacctacagtgccagc

SEQ ID NO: 979 - DNA, 24 bp, Artificial Sequence
  Description of Artificial Sequence:  Hypothetical Probe Sequence
cttggaccttgagaccacgggcaa

SEQ ID NO: 980 - DNA, 24 bp, Artificial Sequence
  Description of Artificial Sequence:  Hypothetical Probe Sequence
cttggaccaggacctaacggacgg

SEQ ID NO: 981 - DNA, 24 bp, Artificial Sequence
  Description of Artificial Sequence:  Hypothetical Probe Sequence
cttggaccggaccctagatgccat

SEQ ID NO: 982 - DNA, 24 bp, Artificial Sequence
  Description of Artificial Sequence:  Hypothetical Probe Sequence
cttggtgcggtactcaagcccttg

SEQ ID NO: 983 - DNA, 24 bp, Artificial Sequence
  Description of Artificial Sequence:  Hypothetical Probe Sequence
cttggtgcgtcttcgtgtgccgaa

SEQ ID NO: 984 - DNA, 24 bp, Artificial Sequence
  Description of Artificial Sequence:  Hypothetical Probe Sequence
cttggtgcgagtaatcgacccgtt

SEQ ID NO: 985 - DNA, 24 bp, Artificial Sequence
  Description of Artificial Sequence:  Hypothetical Probe Sequence
cttggtgcggactctgtgcgttga

SEQ ID NO: 986 - DNA, 24 bp, Artificial Sequence
  Description of Artificial Sequence:  Hypothetical Probe Sequence
cttgggacatcgaggagcttgcaa

SEQ ID NO: 987 - DNA, 24 bp, Artificial Sequence
  Description of Artificial Sequence:  Hypothetical Probe Sequence
cttgggacgacccgttgcttctca

SEQ ID NO: 988 - DNA, 24 bp, Artificial Sequence
  Description of Artificial Sequence:  Hypothetical Probe Sequence
cttgacgggagtagccacggggta

SEQ ID NO: 989 - DNA, 24 bp, Artificial Sequence
  Description of Artificial Sequence:  Hypothetical Probe Sequence
cttgacggacctcacggaccctgt

SEQ ID NO: 990 - DNA, 24 bp, Artificial Sequence
  Description of Artificial Sequence:  Hypothetical Probe Sequence
cttgacggaggatcgtagccggac

SEQ ID NO: 991 - DNA, 24 bp, Artificial Sequence
  Description of Artificial Sequence:  Hypothetical Probe Sequence
cttgacgggatgggtaaggatgcg

SEQ ID NO: 992 - DNA, 24 bp, Artificial Sequence
  Description of Artificial Sequence:  Hypothetical Probe Sequence
cttgagccttgactcatcccgcaa

SEQ ID NO: 993 - DNA, 24 bp, Artificial Sequence
  Description of Artificial Sequence:  Hypothetical Probe Sequence
cttgagcctgatagcctgcgacgg

SEQ ID NO: 994 - DNA, 24 bp, Artificial Sequence
  Description of Artificial Sequence:  Hypothetical Probe Sequence
cttgagccgagtgtgctgattgcg

SEQ ID NO: 995 - DNA, 24 bp, Artificial Sequence
  Description of Artificial Sequence:  Hypothetical Probe Sequence
cttgagcctccctgatccatacgg

SEQ ID NO: 996 - DNA, 24 bp, Artificial Sequence
  Description of Artificial Sequence:  Hypothetical Probe Sequence
cttgagcccagcggactacatgcg

SEQ ID NO: 997 - DNA, 24 bp, Artificial Sequence
  Description of Artificial Sequence:  Hypothetical Probe Sequence
cttgagccggacgagttcgtagcc

SEQ ID NO: 998 - DNA, 24 bp, Artificial Sequence
  Description of Artificial Sequence:  Hypothetical Probe Sequence
cgttttgaatcgggacgtgcagga

SEQ ID NO: 999 - DNA, 24 bp, Artificial Sequence
  Description of Artificial Sequence:  Hypothetical Probe Sequence
cgtttgatcacgctcatgcgcagc

SEQ ID NO: 1000 - DNA, 24 bp, Artificial Sequence
  Description of Artificial Sequence:  Hypothetical Probe Sequence
cgttttaggcaagatgggaccgtt

SEQ ID NO: 1001 - DNA, 24 bp, Artificial Sequence
  Description of Artificial Sequence:  Hypothetical Probe Sequence
cgttaatcgcaagctttgtcgtgc

SEQ ID NO: 1002 - DNA, 24 bp, Artificial Sequence
  Description of Artificial Sequence:  Hypothetical Probe Sequence
cgttaatctccccacgtcccgtgc

SEQ ID NO: 1003 - DNA, 24 bp, Artificial Sequence
  Description of Artificial Sequence:  Hypothetical Probe Sequence
cgttaatccacgctcaagccagcc

SEQ ID NO: 1004 - DNA, 24 bp, Artificial Sequence
  Description of Artificial Sequence:  Hypothetical Probe Sequence
cgttaaagccattcccaaagcacg

SEQ ID NO: 1005 - DNA, 24 bp, Artificial Sequence
  Description of Artificial Sequence:  Hypothetical Probe Sequence
cgtttctgcgttggtaaggagcaa

SEQ ID NO: 1006 - DNA, 24 bp, Artificial Sequence
  Description of Artificial Sequence:  Hypothetical Probe Sequence
cgtttctggcaattagcttgcgaa

SEQ ID NO: 1007 - DNA, 24 bp, Artificial Sequence
  Description of Artificial Sequence:  Hypothetical Probe Sequence
cgtttctgggacaatcgcaatccc

SEQ ID NO: 1008 - DNA, 24 bp, Artificial Sequence
  Description of Artificial Sequence:  Hypothetical Probe Sequence
cgtttctgagccggacagccaaag

SEQ ID NO: 1009 - DNA, 24 bp, Artificial Sequence
  Description of Artificial Sequence:  Hypothetical Probe Sequence
cgtttgtcccatcacgtgtctgcg

SEQ ID NO: 1010 - DNA, 24 bp, Artificial Sequence
  Description of Artificial Sequence:  Hypothetical Probe Sequence
cgtttgtcgtcttgcgggtatgcg

SEQ ID NO: 1011 - DNA, 24 bp, Artificial Sequence
  Description of Artificial Sequence:  Hypothetical Probe Sequence
cgtttgtcatcgcgttcacgtccc

SEQ ID NO: 1012 - DNA, 24 bp, Artificial Sequence
  Description of Artificial Sequence:  Hypothetical Probe Sequence
cgtttgtcgatgccataccttgcg

SEQ ID NO: 1013 - DNA, 24 bp, Artificial Sequence
  Description of Artificial Sequence:  Hypothetical Probe Sequence
cgtttcgtaaagcgaatgcgacct

SEQ ID NO: 1014 - DNA, 24 bp, Artificial Sequence
  Description of Artificial Sequence:  Hypothetical Probe Sequence
cgtttcgtggtaacggcgttatcg

SEQ ID NO: 1015 - DNA, 24 bp, Artificial Sequence
  Description of Artificial Sequence:  Hypothetical Probe Sequence
cgtttcgtacggaaagcttgccat

SEQ ID NO: 1016 - DNA, 24 bp, Artificial Sequence
  Description of Artificial Sequence:  Hypothetical Probe Sequence
cgttcttgcagccgttccatgcaa

SEQ ID NO: 1017 - DNA, 24 bp, Artificial Sequence
  Description of Artificial Sequence:  Hypothetical Probe Sequence
cgttcgttttgagcaatcccatcg

SEQ ID NO: 1018 - DNA, 24 bp, Artificial Sequence
  Description of Artificial Sequence:  Hypothetical Probe Sequence
cgttcgttaaagacggtcccgtgc

SEQ ID NO: 1019 - DNA, 24 bp, Artificial Sequence
  Description of Artificial Sequence:  Hypothetical Probe Sequence
cgttcgttcgaaaaagaggatgcg

SEQ ID NO: 1020 - DNA, 24 bp, Artificial Sequence
  Description of Artificial Sequence:  Hypothetical Probe Sequence
cgttcgttgtcttgcgtgcgctgt

SEQ ID NO: 1021 - DNA, 24 bp, Artificial Sequence
  Description of Artificial Sequence:  Hypothetical Probe Sequence
cgttctcaatcggacccacgcgaa

SEQ ID NO: 1022 - DNA, 24 bp, Artificial Sequence
  Description of Artificial Sequence:  Hypothetical Probe Sequence
cgttctcaacgggacccttgatcg

SEQ ID NO: 1023 - DNA, 24 bp, Artificial Sequence
  Description of Artificial Sequence:  Hypothetical Probe Sequence
cgttctgttcgtaggaacggacgg

SEQ ID NO: 1024 - DNA, 24 bp, Artificial Sequence
  Description of Artificial Sequence:  Hypothetical Probe Sequence
cgttccattgtcgaccagcccagc

SEQ ID NO: 1025 - DNA, 24 bp, Artificial Sequence
  Description of Artificial Sequence:  Hypothetical Probe Sequence
cgttccatccatcgaactgttgcg

SEQ ID NO: 1026 - DNA, 24 bp, Artificial Sequence
  Description of Artificial Sequence:  Hypothetical Probe Sequence
cgttccatatcgccattgcggatg

SEQ ID NO: 1027 - DNA, 24 bp, Artificial Sequence
  Description of Artificial Sequence:  Hypothetical Probe Sequence
cgttccatgatgtgatcagcgcaa

SEQ ID NO: 1028 - DNA, 24 bp, Artificial Sequence
  Description of Artificial Sequence:  Hypothetical Probe Sequence
cgttccatgaccaatcgatgcgaa

SEQ ID NO: 1029 - DNA, 24 bp, Artificial Sequence
  Description of Artificial Sequence:  Hypothetical Probe Sequence
cgttccatggacgcaaacctcgtt

SEQ ID NO: 1030 - DNA, 24 bp, Artificial Sequence
  Description of Artificial Sequence:  Hypothetical Probe Sequence
cgttccatacggagcctctgagga

SEQ ID NO: 1031 - DNA, 24 bp, Artificial Sequence
  Description of Artificial Sequence:  Hypothetical Probe Sequence
cgttcgaatcgtagccgatgctgt

SEQ ID NO: 1032 - DNA, 24 bp, Artificial Sequence
  Description of Artificial Sequence:  Hypothetical Probe Sequence
cgttcgaacttgcacggcttgacc

SEQ ID NO: 1033 - DNA, 24 bp, Artificial Sequence
  Description of Artificial Sequence:  Hypothetical Probe Sequence
cgttcgaactcagatgtcccgtgc

SEQ ID NO: 1034 - DNA, 24 bp, Artificial Sequence
  Description of Artificial Sequence:  Hypothetical Probe Sequence
cgttcgaagagttgcggcttacct

SEQ ID NO: 1035 - DNA, 24 bp, Artificial Sequence
  Description of Artificial Sequence:  Hypothetical Probe Sequence
cgttcgaaatcgtacaacggagcc

SEQ ID NO: 1036 - DNA, 24 bp, Artificial Sequence
  Description of Artificial Sequence:  Hypothetical Probe Sequence
cgttcgaagaccgacccacgggta

SEQ ID NO: 1037 - DNA, 24 bp, Artificial Sequence
  Description of Artificial Sequence:  Hypothetical Probe Sequence
cgttgcttgtctacggggacgacc

SEQ ID NO: 1038 - DNA, 24 bp, Artificial Sequence
  Description of Artificial Sequence:  Hypothetical Probe Sequence
cgttgtctcgttatcggtcttgcg

SEQ ID NO: 1039 - DNA, 24 bp, Artificial Sequence
  Description of Artificial Sequence:  Hypothetical Probe Sequence
cgttgagttcgtgcaaacgggcaa

SEQ ID NO: 1040 - DNA, 24 bp, Artificial Sequence
  Description of Artificial Sequence:  Hypothetical Probe Sequence
cgttgagtcagccgaacgtttccc

SEQ ID NO: 1041 - DNA, 24 bp, Artificial Sequence
  Description of Artificial Sequence:  Hypothetical Probe Sequence
cgttgagtggacgatgcagcaatc

SEQ ID NO: 1042 - DNA, 24 bp, Artificial Sequence
  Description of Artificial Sequence:  Hypothetical Probe Sequence
cgttgcaatgatgctttgcggtct

SEQ ID NO: 1043 - DNA, 24 bp, Artificial Sequence
  Description of Artificial Sequence:  Hypothetical Probe Sequence
cgttgcaacgaacgaaaatcgacc

SEQ ID NO: 1044 - DNA, 24 bp, Artificial Sequence
  Description of Artificial Sequence:  Hypothetical Probe Sequence
cgttgcaaggtagacctgcggacc

SEQ ID NO: 1045 - DNA, 24 bp, Artificial Sequence
  Description of Artificial Sequence:  Hypothetical Probe Sequence
cgttgcaagagtaaagtgcgcgtt

SEQ ID NO: 1046 - DNA, 24 bp, Artificial Sequence
  Description of Artificial Sequence:  Hypothetical Probe Sequence
cgttgcaaacctcctagcaaacgg

SEQ ID NO: 1047 - DNA, 24 bp, Artificial Sequence
  Description of Artificial Sequence:  Hypothetical Probe Sequence
cgttgcaacagcacctctgtagcc

SEQ ID NO: 1048 - DNA, 24 bp, Artificial Sequence
  Description of Artificial Sequence:  Hypothetical Probe Sequence
cgttgcaaagccgctttacagcaa

SEQ ID NO: 1049 - DNA, 24 bp, Artificial Sequence
  Description of Artificial Sequence:  Hypothetical Probe Sequence
cgttagtgcacgggacaccttccc

SEQ ID NO: 1050 - DNA, 24 bp, Artificial Sequence
  Description of Artificial Sequence:  Hypothetical Probe Sequence
cgttagtgcagccagcggacgctt

SEQ ID NO: 1051 - DNA, 24 bp, Artificial Sequence
  Description of Artificial Sequence:  Hypothetical Probe Sequence
cgttagtggtgccacggacccgaa

SEQ ID NO: 1052 - DNA, 24 bp, Artificial Sequence
  Description of Artificial Sequence:  Hypothetical Probe Sequence
cgttacctgacctgcgcgttgcaa

SEQ ID NO: 1053 - DNA, 24 bp, Artificial Sequence
  Description of Artificial Sequence:  Hypothetical Probe Sequence
cgttatcgctgtcagcgtgcccat

SEQ ID NO: 1054 - DNA, 24 bp, Artificial Sequence
  Description of Artificial Sequence:  Hypothetical Probe Sequence
cgttatcgggtatcgtgacccgaa

SEQ ID NO: 1055 - DNA, 24 bp, Artificial Sequence
  Description of Artificial Sequence:  Hypothetical Probe Sequence
cgttatcggacctctgggacgctt

SEQ ID NO: 1056 - DNA, 24 bp, Artificial Sequence
  Description of Artificial Sequence:  Hypothetical Probe Sequence
cgttaggatgcgtacagtgcgtgc

SEQ ID NO: 1057 - DNA, 24 bp, Artificial Sequence
  Description of Artificial Sequence:  Hypothetical Probe Sequence
cgttaggaagccggtaggactgcg

SEQ ID NO: 1058 - DNA, 24 bp, Artificial Sequence
  Description of Artificial Sequence:  Hypothetical Probe Sequence
cgttgatgcgttaatcggactccc

SEQ ID NO: 1059 - DNA, 24 bp, Artificial Sequence
  Description of Artificial Sequence:  Hypothetical Probe Sequence
cgttgatggaccgtgccctagcaa

SEQ ID NO: 1060 - DNA, 24 bp, Artificial Sequence
  Description of Artificial Sequence:  Hypothetical Probe Sequence
cgttgatgggacgacccacgagga

SEQ ID NO: 1061 - DNA, 24 bp, Artificial Sequence
  Description of Artificial Sequence:  Hypothetical Probe Sequence
cgtttcccagtgggtacacggtgc

SEQ ID NO: 1062 - DNA, 24 bp, Artificial Sequence
  Description of Artificial Sequence:  Hypothetical Probe Sequence
cgtttccccctaaatcccatcagc

SEQ ID NO: 1063 - DNA, 24 bp, Artificial Sequence
  Description of Artificial Sequence:  Hypothetical Probe Sequence
cgtttccctccctcgtcgaagatg

SEQ ID NO: 1064 - DNA, 24 bp, Artificial Sequence
  Description of Artificial Sequence:  Hypothetical Probe Sequence
cgtttccctgcgccatggtacgaa

SEQ ID NO: 1065 - DNA, 24 bp, Artificial Sequence
  Description of Artificial Sequence:  Hypothetical Probe Sequence
cgtttgcgatacagcctcccctca

SEQ ID NO: 1066 - DNA, 24 bp, Artificial Sequence
  Description of Artificial Sequence:  Hypothetical Probe Sequence
cgtttgcgcgaatgcgttagcttg

SEQ ID NO: 1067 - DNA, 24 bp, Artificial Sequence
  Description of Artificial Sequence:  Hypothetical Probe Sequence
cgtttgcggcttgtgcctcagctt

SEQ ID NO: 1068 - DNA, 24 bp, Artificial Sequence
  Description of Artificial Sequence:  Hypothetical Probe Sequence
cgtttgcggtcttacacacgcgaa

SEQ ID NO: 1069 - DNA, 24 bp, Artificial Sequence
  Description of Artificial Sequence:  Hypothetical Probe Sequence
cgtttgcgaggaatcgttagcgaa

SEQ ID NO: 1070 - DNA, 24 bp, Artificial Sequence
  Description of Artificial Sequence:  Hypothetical Probe Sequence
cgtttgcggatgccatgcttgagt

SEQ ID NO: 1071 - DNA, 24 bp, Artificial Sequence
  Description of Artificial Sequence:  Hypothetical Probe Sequence
cgtttgcgtcccttgagcttcagc

SEQ ID NO: 1072 - DNA, 24 bp, Artificial Sequence
  Description of Artificial Sequence:  Hypothetical Probe Sequence
cgtttgcgcacgcgttgctttgat

SEQ ID NO: 1073 - DNA, 24 bp, Artificial Sequence
  Description of Artificial Sequence:  Hypothetical Probe Sequence
cgttcacgtcgttgtccagcggta

SEQ ID NO: 1074 - DNA, 24 bp, Artificial Sequence
  Description of Artificial Sequence:  Hypothetical Probe Sequence
cgttcacgcttgtgatccatcgaa

SEQ ID NO: 1075 - DNA, 24 bp, Artificial Sequence
  Description of Artificial Sequence:  Hypothetical Probe Sequence
cgttcacgctgtcttgtgcgggta

SEQ ID NO: 1076 - DNA, 24 bp, Artificial Sequence
  Description of Artificial Sequence:  Hypothetical Probe Sequence
cgttcacggatgttagcgaatccc

SEQ ID NO: 1077 - DNA, 24 bp, Artificial Sequence
  Description of Artificial Sequence:  Hypothetical Probe Sequence
cgttcacgcagcgcaatcgtggta

SEQ ID NO: 1078 - DNA, 24 bp, Artificial Sequence
  Description of Artificial Sequence:  Hypothetical Probe Sequence
cgttcacggaccaaagttagtgcg

SEQ ID NO: 1079 - DNA, 24 bp, Artificial Sequence
  Description of Artificial Sequence:  Hypothetical Probe Sequence
cgttcacgacgggtctgcaagctt

SEQ ID NO: 1080 - DNA, 24 bp, Artificial Sequence
  Description of Artificial Sequence:  Hypothetical Probe Sequence
cgttcacgagcctcgtcacgccta

SEQ ID NO: 1081 - DNA, 24 bp, Artificial Sequence
  Description of Artificial Sequence:  Hypothetical Probe Sequence
cgttcagctctggaccaaagctca

SEQ ID NO: 1082 - DNA, 24 bp, Artificial Sequence
  Description of Artificial Sequence:  Hypothetical Probe Sequence
cgttcagcgcttcgtttctgccta

SEQ ID NO: 1083 - DNA, 24 bp, Artificial Sequence
  Description of Artificial Sequence:  Hypothetical Probe Sequence
cgttcagccacgcagcaggactca

SEQ ID NO: 1084 - DNA, 24 bp, Artificial Sequence
  Description of Artificial Sequence:  Hypothetical Probe Sequence
cgttcagcgtgcttgaaatcgtgc

SEQ ID NO: 1085 - DNA, 24 bp, Artificial Sequence
  Description of Artificial Sequence:  Hypothetical Probe Sequence
cgttgacctctgtccccagcgagt

SEQ ID NO: 1086 - DNA, 24 bp, Artificial Sequence
  Description of Artificial Sequence:  Hypothetical Probe Sequence
cgttgaccctgtcgaacgaatccc

SEQ ID NO: 1087 - DNA, 24 bp, Artificial Sequence
  Description of Artificial Sequence:  Hypothetical Probe Sequence
cgttgaccatcgttagcacgccta

SEQ ID NO: 1088 - DNA, 24 bp, Artificial Sequence
  Description of Artificial Sequence:  Hypothetical Probe Sequence
cgttgacctgcgctcaggtaagcc

SEQ ID NO: 1089 - DNA, 24 bp, Artificial Sequence
  Description of Artificial Sequence:  Hypothetical Probe Sequence
cgttgacccagctcccgtctagga

SEQ ID NO: 1090 - DNA, 24 bp, Artificial Sequence
  Description of Artificial Sequence:  Hypothetical Probe Sequence
cgttgtgctgtccttgcagctgcg

SEQ ID NO: 1091 - DNA, 24 bp, Artificial Sequence
  Description of Artificial Sequence:  Hypothetical Probe Sequence
cgttgtgccttgtacacagcgacc

SEQ ID NO: 1092 - DNA, 24 bp, Artificial Sequence
  Description of Artificial Sequence:  Hypothetical Probe Sequence
cgttgtgcctcaaaagtccccagc

SEQ ID NO: 1093 - DNA, 24 bp, Artificial Sequence
  Description of Artificial Sequence:  Hypothetical Probe Sequence
cgttgtgcgatgtgtcgcttcagc

SEQ ID NO: 1094 - DNA, 24 bp, Artificial Sequence
  Description of Artificial Sequence:  Hypothetical Probe Sequence
cgttgtgcgaccgtctatcgtgcg

SEQ ID NO: 1095 - DNA, 24 bp, Artificial Sequence
  Description of Artificial Sequence:  Hypothetical Probe Sequence
cgttggaccgttggaccgaatgat

SEQ ID NO: 1096 - DNA, 24 bp, Artificial Sequence
  Description of Artificial Sequence:  Hypothetical Probe Sequence
cgttggacggtacgaagcttcacg

SEQ ID NO: 1097 - DNA, 24 bp, Artificial Sequence
  Description of Artificial Sequence:  Hypothetical Probe Sequence
cgttggacaggatgtcacggcagc

SEQ ID NO: 1098 - DNA, 24 bp, Artificial Sequence
  Description of Artificial Sequence:  Hypothetical Probe Sequence
cgttggacggacttgaagtgtgcg

SEQ ID NO: 1099 - DNA, 24 bp, Artificial Sequence
  Description of Artificial Sequence:  Hypothetical Probe Sequence
cgttggacacggccatctgtgcaa

SEQ ID NO: 1100 - DNA, 24 bp, Artificial Sequence
  Description of Artificial Sequence:  Hypothetical Probe Sequence
cgttacggttgaacctggacgtgc

SEQ ID NO: 1101 - DNA, 24 bp, Artificial Sequence
  Description of Artificial Sequence:  Hypothetical Probe Sequence
cgttacggaatccttgcacgctca

SEQ ID NO: 1102 - DNA, 24 bp, Artificial Sequence
  Description of Artificial Sequence:  Hypothetical Probe Sequence
cgttacggaaaggaccgaccatcg

SEQ ID NO: 1103 - DNA, 24 bp, Artificial Sequence
  Description of Artificial Sequence:  Hypothetical Probe Sequence
cgttacggtctggaccgcaaggac

SEQ ID NO: 1104 - DNA, 24 bp, Artificial Sequence
  Description of Artificial Sequence:  Hypothetical Probe Sequence
cgttacggctgtcttgtcccgacc

SEQ ID NO: 1105 - DNA, 24 bp, Artificial Sequence
  Description of Artificial Sequence:  Hypothetical Probe Sequence
cgttacgggagtttgattgatgcg

SEQ ID NO: 1106 - DNA, 24 bp, Artificial Sequence
  Description of Artificial Sequence:  Hypothetical Probe Sequence
cgttacgggatgcagcagtgcgaa

SEQ ID NO: 1107 - DNA, 24 bp, Artificial Sequence
  Description of Artificial Sequence:  Hypothetical Probe Sequence
cgttagccttgagtgccttgcacg

SEQ ID NO: 1108 - DNA, 24 bp, Artificial Sequence
  Description of Artificial Sequence:  Hypothetical Probe Sequence
cgttagcctgattgcgcagccttg

SEQ ID NO: 1109 - DNA, 24 bp, Artificial Sequence
  Description of Artificial Sequence:  Hypothetical Probe Sequence
cgttagccgacctgtcatcgcttg

SEQ ID NO: 1110 - DNA, 24 bp, Artificial Sequence
  Description of Artificial Sequence:  Hypothetical Probe Sequence
cgttagccacggctcaaatcgacc

SEQ ID NO: 1111 - DNA, 24 bp, Artificial Sequence
  Description of Artificial Sequence:  Hypothetical Probe Sequence
ctcattgaagcctcgtacggtgcg

SEQ ID NO: 1112 - DNA, 24 bp, Artificial Sequence
  Description of Artificial Sequence:  Hypothetical Probe Sequence
ctcaaatcgcttcagcagcctgcg

SEQ ID NO: 1113 - DNA, 24 bp, Artificial Sequence
  Description of Artificial Sequence:  Hypothetical Probe Sequence
ctcaaaagcgttgtgccagcagcc

SEQ ID NO: 1114 - DNA, 24 bp, Artificial Sequence
  Description of Artificial Sequence:  Hypothetical Probe Sequence
ctcatgtctgcgcagctgcggtct

SEQ ID NO: 1115 - DNA, 24 bp, Artificial Sequence
  Description of Artificial Sequence:  Hypothetical Probe Sequence
ctcatcgtcacgggactgcggcaa

SEQ ID NO: 1116 - DNA, 24 bp, Artificial Sequence
  Description of Artificial Sequence:  Hypothetical Probe Sequence
ctcatcgtagccaggagtgccgaa

SEQ ID NO: 1117 - DNA, 24 bp, Artificial Sequence
  Description of Artificial Sequence:  Hypothetical Probe Sequence
ctcacttgagtgcgttcgtttgcg

SEQ ID NO: 1118 - DNA, 24 bp, Artificial Sequence
  Description of Artificial Sequence:  Hypothetical Probe Sequence
ctcacgtttcgtgacctgtctgcg

SEQ ID NO: 1119 - DNA, 24 bp, Artificial Sequence
  Description of Artificial Sequence:  Hypothetical Probe Sequence
ctcacgttacggcgaaaggaacgg

SEQ ID NO: 1120 - DNA, 24 bp, Artificial Sequence
  Description of Artificial Sequence:  Hypothetical Probe Sequence
ctcactcaacggcgaatgcgccat

SEQ ID NO: 1121 - DNA, 24 bp, Artificial Sequence
  Description of Artificial Sequence:  Hypothetical Probe Sequence
ctcaccatgcttggacggacacgg

SEQ ID NO: 1122 - DNA, 24 bp, Artificial Sequence
  Description of Artificial Sequence:  Hypothetical Probe Sequence
ctcaccattgcgaaaggaccctgt

SEQ ID NO: 1123 - DNA, 24 bp, Artificial Sequence
  Description of Artificial Sequence:  Hypothetical Probe Sequence
ctcacgaaatcgatcgcagctgcg

SEQ ID NO: 1124 - DNA, 24 bp, Artificial Sequence
  Description of Artificial Sequence:  Hypothetical Probe Sequence
ctcacgaacacgaggaacggtccc

SEQ ID NO: 1125 - DNA, 24 bp, Artificial Sequence
  Description of Artificial Sequence:  Hypothetical Probe Sequence
ctcacgaacagcacggcacggtgc

SEQ ID NO: 1126 - DNA, 24 bp, Artificial Sequence
  Description of Artificial Sequence:  Hypothetical Probe Sequence
ctcagcaaacggacggaaagggac

SEQ ID NO: 1127 - DNA, 24 bp, Artificial Sequence
  Description of Artificial Sequence:  Hypothetical Probe Sequence
ctcaagtggtgccgaagtgctgcg

SEQ ID NO: 1128 - DNA, 24 bp, Artificial Sequence
  Description of Artificial Sequence:  Hypothetical Probe Sequence
ctcaacctacggtgcggaccgtgc

SEQ ID NO: 1129 - DNA, 24 bp, Artificial Sequence
  Description of Artificial Sequence:  Hypothetical Probe Sequence
ctcaatcgcttggcaaacggtctg

SEQ ID NO: 1130 - DNA, 24 bp, Artificial Sequence
  Description of Artificial Sequence:  Hypothetical Probe Sequence
ctcaatcgccatcacgcgtttgat

SEQ ID NO: 1131 - DNA, 24 bp, Artificial Sequence
  Description of Artificial Sequence:  Hypothetical Probe Sequence
ctcaatcgggtagcttcagcgtgc

SEQ ID NO: 1132 - DNA, 24 bp, Artificial Sequence
  Description of Artificial Sequence:  Hypothetical Probe Sequence
ctcaatcgacgggtctggacacgg

SEQ ID NO: 1133 - DNA, 24 bp, Artificial Sequence
  Description of Artificial Sequence:  Hypothetical Probe Sequence
ctcaaggagcttcagccagccgaa

SEQ ID NO: 1134 - DNA, 24 bp, Artificial Sequence
  Description of Artificial Sequence:  Hypothetical Probe Sequence
ctcaaggacacggtgccacgacgg

SEQ ID NO: 1135 - DNA, 24 bp, Artificial Sequence
  Description of Artificial Sequence:  Hypothetical Probe Sequence
ctcatcccgcttgcaaccatgacc

SEQ ID NO: 1136 - DNA, 24 bp, Artificial Sequence
  Description of Artificial Sequence:  Hypothetical Probe Sequence
ctcatgcgaatcatcgcagccacg

SEQ ID NO: 1137 - DNA, 24 bp, Artificial Sequence
  Description of Artificial Sequence:  Hypothetical Probe Sequence
ctcatgcgtctgagcctgcggtct

SEQ ID NO: 1138 - DNA, 24 bp, Artificial Sequence
  Description of Artificial Sequence:  Hypothetical Probe Sequence
ctcatgcgctcaggaccgtttgat

SEQ ID NO: 1139 - DNA, 24 bp, Artificial Sequence
  Description of Artificial Sequence:  Hypothetical Probe Sequence
ctcatgcggtctagcccttgtcgt

SEQ ID NO: 1140 - DNA, 24 bp, Artificial Sequence
  Description of Artificial Sequence:  Hypothetical Probe Sequence
ctcatgcgtccccctacctaacgg

SEQ ID NO: 1141 - DNA, 24 bp, Artificial Sequence
  Description of Artificial Sequence:  Hypothetical Probe Sequence
ctcatgcggaccgcttgacctcgt

SEQ ID NO: 1142 - DNA, 24 bp, Artificial Sequence
  Description of Artificial Sequence:  Hypothetical Probe Sequence
ctcacacgcctaggacacggcagc

SEQ ID NO: 1143 - DNA, 24 bp, Artificial Sequence
  Description of Artificial Sequence:  Hypothetical Probe Sequence
ctcacacgcagcgtgcctcacacg

SEQ ID NO: 1144 - DNA, 24 bp, Artificial Sequence
  Description of Artificial Sequence:  Hypothetical Probe Sequence
ctcacacggaccgtctgcaatgcg

SEQ ID NO: 1145 - DNA, 24 bp, Artificial Sequence
  Description of Artificial Sequence:  Hypothetical Probe Sequence
ctcacagcatcgagccacggcgaa

SEQ ID NO: 1146 - DNA, 24 bp, Artificial Sequence
  Description of Artificial Sequence:  Hypothetical Probe Sequence
ctcacagctgcgggacaggagcaa

SEQ ID NO: 1147 - DNA, 24 bp, Artificial Sequence
  Description of Artificial Sequence:  Hypothetical Probe Sequence
ctcagaccgatggtctccattgcg

SEQ ID NO: 1148 - DNA, 24 bp, Artificial Sequence
  Description of Artificial Sequence:  Hypothetical Probe Sequence
ctcagaccgtgcgagtagcctgcg

SEQ ID NO: 1149 - DNA, 24 bp, Artificial Sequence
  Description of Artificial Sequence:  Hypothetical Probe Sequence
ctcaggacgatgcacgtcccggac

SEQ ID NO: 1150 - DNA, 24 bp, Artificial Sequence
  Description of Artificial Sequence:  Hypothetical Probe Sequence
ctcaggacggacccatagccccat

SEQ ID NO: 1151 - DNA, 24 bp, Artificial Sequence
  Description of Artificial Sequence:  Hypothetical Probe Sequence
ctcaacggccataaaggcaagacc

SEQ ID NO: 1152 - DNA, 24 bp, Artificial Sequence
  Description of Artificial Sequence:  Hypothetical Probe Sequence
ctcaacgggtctccatttgaagcc

SEQ ID NO: 1153 - DNA, 24 bp, Artificial Sequence
  Description of Artificial Sequence:  Hypothetical Probe Sequence
ctcaacggatcggacctgtccacg

SEQ ID NO: 1154 - DNA, 24 bp, Artificial Sequence
  Description of Artificial Sequence:  Hypothetical Probe Sequence
ctcaacggaggaaaagtgcggcaa

SEQ ID NO: 1155 - DNA, 24 bp, Artificial Sequence
  Description of Artificial Sequence:  Hypothetical Probe Sequence
ctcaacggcctaggacgtgcgtct

SEQ ID NO: 1156 - DNA, 24 bp, Artificial Sequence
  Description of Artificial Sequence:  Hypothetical Probe Sequence
ctcaagccttgaaatcacggcgtt

SEQ ID NO: 1157 - DNA, 24 bp, Artificial Sequence
  Description of Artificial Sequence:  Hypothetical Probe Sequence
ctcaagcctctgagcccgttccat

SEQ ID NO: 1158 - DNA, 24 bp, Artificial Sequence
  Description of Artificial Sequence:  Hypothetical Probe Sequence
ctcaagcccgttggactcccaaag

SEQ ID NO: 1159 - DNA, 24 bp, Artificial Sequence
  Description of Artificial Sequence:  Hypothetical Probe Sequence
ctcaagccggtacgaaccatagcc

SEQ ID NO: 1160 - DNA, 24 bp, Artificial Sequence
  Description of Artificial Sequence:  Hypothetical Probe Sequence
ctcaagccgatgtccctgcgttag

SEQ ID NO: 1161 - DNA, 24 bp, Artificial Sequence
  Description of Artificial Sequence:  Hypothetical Probe Sequence
ctgtcgttcgttacggcagcggac

SEQ ID NO: 1162 - DNA, 24 bp, Artificial Sequence
  Description of Artificial Sequence:  Hypothetical Probe Sequence
ctgtcgttccattccctgcgggac

SEQ ID NO: 1163 - DNA, 24 bp, Artificial Sequence
  Description of Artificial Sequence:  Hypothetical Probe Sequence
ctgtcgttcagccctatgcgcagc

SEQ ID NO: 1164 - DNA, 24 bp, Artificial Sequence
  Description of Artificial Sequence:  Hypothetical Probe Sequence
ctgtcgaacgtttgcgcagcaatc

SEQ ID NO: 1165 - DNA, 24 bp, Artificial Sequence
  Description of Artificial Sequence:  Hypothetical Probe Sequence
ctgtcgaatccccgttgaccgagt

SEQ ID NO: 1166 - DNA, 24 bp, Artificial Sequence
  Description of Artificial Sequence:  Hypothetical Probe Sequence
ctgtgcttgtgcgagtccatcacg

SEQ ID NO: 1167 - DNA, 24 bp, Artificial Sequence
  Description of Artificial Sequence:  Hypothetical Probe Sequence
ctgtgcaaccatagccggacgcaa

SEQ ID NO: 1168 - DNA, 24 bp, Artificial Sequence
  Description of Artificial Sequence:  Hypothetical Probe Sequence
ctgtgcaacgaatgtcagccacgg

SEQ ID NO: 1169 - DNA, 24 bp, Artificial Sequence
  Description of Artificial Sequence:  Hypothetical Probe Sequence
ctgtgcaagcaatctgcagccttg

SEQ ID NO: 1170 - DNA, 24 bp, Artificial Sequence
  Description of Artificial Sequence:  Hypothetical Probe Sequence
ctgtgcaagaccgcaaatcgtgcg

SEQ ID NO: 1171 - DNA, 24 bp, Artificial Sequence
  Description of Artificial Sequence:  Hypothetical Probe Sequence
ctgtgatgtgcgaatcggacgcaa

SEQ ID NO: 1172 - DNA, 24 bp, Artificial Sequence
  Description of Artificial Sequence:  Hypothetical Probe Sequence
ctgttccccttgaggaccatcacg

SEQ ID NO: 1173 - DNA, 24 bp, Artificial Sequence
  Description of Artificial Sequence:  Hypothetical Probe Sequence
ctgttcccgcttcctagtgcgacc

SEQ ID NO: 1174 - DNA, 24 bp, Artificial Sequence
  Description of Artificial Sequence:  Hypothetical Probe Sequence
ctgttcccagtgcgaatcccggac

SEQ ID NO: 1175 - DNA, 24 bp, Artificial Sequence
  Description of Artificial Sequence:  Hypothetical Probe Sequence
ctgttgcgtgtccacgcctatgcg

SEQ ID NO: 1176 - DNA, 24 bp, Artificial Sequence
  Description of Artificial Sequence:  Hypothetical Probe Sequence
ctgttgcgcgaacttgccatggta

SEQ ID NO: 1177 - DNA, 24 bp, Artificial Sequence
  Description of Artificial Sequence:  Hypothetical Probe Sequence
ctgttgcggctttcgtgcttttga

SEQ ID NO: 1178 - DNA, 24 bp, Artificial Sequence
  Description of Artificial Sequence:  Hypothetical Probe Sequence
ctgttgcggagtccatcagcgctt

SEQ ID NO: 1179 - DNA, 24 bp, Artificial Sequence
  Description of Artificial Sequence:  Hypothetical Probe Sequence
ctgttgcgaggaaaagctgttgcg

SEQ ID NO: 1180 - DNA, 24 bp, Artificial Sequence
  Description of Artificial Sequence:  Hypothetical Probe Sequence
ctgttgcgcagcacggcctaatac

SEQ ID NO: 1181 - DNA, 24 bp, Artificial Sequence
  Description of Artificial Sequence:  Hypothetical Probe Sequence
ctgtcacgctgttcccgaccagga

SEQ ID NO: 1182 - DNA, 24 bp, Artificial Sequence
  Description of Artificial Sequence:  Hypothetical Probe Sequence
ctgtcacgccataatcgtgccacg

SEQ ID NO: 1183 - DNA, 24 bp, Artificial Sequence
  Description of Artificial Sequence:  Hypothetical Probe Sequence
ctgtcacgcgaaatacgcaacgaa

SEQ ID NO: 1184 - DNA, 24 bp, Artificial Sequence
  Description of Artificial Sequence:  Hypothetical Probe Sequence
ctgtcacgggtaacggcgaagcaa

SEQ ID NO: 1185 - DNA, 24 bp, Artificial Sequence
  Description of Artificial Sequence:  Hypothetical Probe Sequence
ctgtcacggatgggacgcaacagc

SEQ ID NO: 1186 - DNA, 24 bp, Artificial Sequence
  Description of Artificial Sequence:  Hypothetical Probe Sequence
ctgtcagcatcgcgttgcaatgcg

SEQ ID NO: 1187 - DNA, 24 bp, Artificial Sequence
  Description of Artificial Sequence:  Hypothetical Probe Sequence
ctgtcagcgatgtgcggtgcccat

SEQ ID NO: 1188 - DNA, 24 bp, Artificial Sequence
  Description of Artificial Sequence:  Hypothetical Probe Sequence
ctgtcagctgcgagtgagccgtgc

SEQ ID NO: 1189 - DNA, 24 bp, Artificial Sequence
  Description of Artificial Sequence:  Hypothetical Probe Sequence
ctgtgaccgcaaatacgaccgtgc

SEQ ID NO: 1190 - DNA, 24 bp, Artificial Sequence
  Description of Artificial Sequence:  Hypothetical Probe Sequence
ctgtgacctccccagctgcgtcgt

SEQ ID NO: 1191 - DNA, 24 bp, Artificial Sequence
  Description of Artificial Sequence:  Hypothetical Probe Sequence
ctgtgacctgcgcacgccattgtc

SEQ ID NO: 1192 - DNA, 24 bp, Artificial Sequence
  Description of Artificial Sequence:  Hypothetical Probe Sequence
ctgtgacccacgacctacggcttg

SEQ ID NO: 1193 - DNA, 24 bp, Artificial Sequence
  Description of Artificial Sequence:  Hypothetical Probe Sequence
ctgtgtgcgcttccatcttgggac

SEQ ID NO: 1194 - DNA, 24 bp, Artificial Sequence
  Description of Artificial Sequence:  Hypothetical Probe Sequence
ctgtgtgctgcggatgatcggcaa

SEQ ID NO: 1195 - DNA, 24 bp, Artificial Sequence
  Description of Artificial Sequence:  Hypothetical Probe Sequence
ctgtgtgcggactgatcacgtgcg

SEQ ID NO: 1196 - DNA, 24 bp, Artificial Sequence
  Description of Artificial Sequence:  Hypothetical Probe Sequence
ctgtggacggacatacggacgctt

SEQ ID NO: 1197 - DNA, 24 bp, Artificial Sequence
  Description of Artificial Sequence:  Hypothetical Probe Sequence
ctgtggacagccctcacacgtgcg

SEQ ID NO: 1198 - DNA, 24 bp, Artificial Sequence
  Description of Artificial Sequence:  Hypothetical Probe Sequence
ctgtacggcttggaccgtgcgatg

SEQ ID NO: 1199 - DNA, 24 bp, Artificial Sequence
  Description of Artificial Sequence:  Hypothetical Probe Sequence
ctgtacggacctacgggaccacgg

SEQ ID NO: 1200 - DNA, 24 bp, Artificial Sequence
  Description of Artificial Sequence:  Hypothetical Probe Sequence
ctgtagcctcgtgcttcacgcgaa

SEQ ID NO: 1201 - DNA, 24 bp, Artificial Sequence
  Description of Artificial Sequence:  Hypothetical Probe Sequence
ctgtagccgcttatcgtgtctgcg

SEQ ID NO: 1202 - DNA, 24 bp, Artificial Sequence
  Description of Artificial Sequence:  Hypothetical Probe Sequence
ctgtagccgtcttgcgggacgtgc

SEQ ID NO: 1203 - DNA, 24 bp, Artificial Sequence
  Description of Artificial Sequence:  Hypothetical Probe Sequence
ctgtagcctcccaaagctcaacgg

SEQ ID NO: 1204 - DNA, 24 bp, Artificial Sequence
  Description of Artificial Sequence:  Hypothetical Probe Sequence
ctgtagccgacctctgcttgcagc

SEQ ID NO: 1205 - DNA, 24 bp, Artificial Sequence
  Description of Artificial Sequence:  Hypothetical Probe Sequence
ccatttgaggaccgaacacgacgg

SEQ ID NO: 1206 - DNA, 24 bp, Artificial Sequence
  Description of Artificial Sequence:  Hypothetical Probe Sequence
ccattgatgaccggaccacggcaa

SEQ ID NO: 1207 - DNA, 24 bp, Artificial Sequence
  Description of Artificial Sequence:  Hypothetical Probe Sequence
ccatttaggaccaaagccattgcg

SEQ ID NO: 1208 - DNA, 24 bp, Artificial Sequence
  Description of Artificial Sequence:  Hypothetical Probe Sequence
ccataatccgttgcttgtgcccat

SEQ ID NO: 1209 - DNA, 24 bp, Artificial Sequence
  Description of Artificial Sequence:  Hypothetical Probe Sequence
ccataatctcccccatcacgcgaa

SEQ ID NO: 1210 - DNA, 24 bp, Artificial Sequence
  Description of Artificial Sequence:  Hypothetical Probe Sequence
ccataatcagcccgaatccctccc

SEQ ID NO: 1211 - DNA, 24 bp, Artificial Sequence
  Description of Artificial Sequence:  Hypothetical Probe Sequence
ccataaagcttgcagcatcggcaa

SEQ ID NO: 1212 - DNA, 24 bp, Artificial Sequence
  Description of Artificial Sequence:  Hypothetical Probe Sequence
ccataaagacggcgaagacccgtt

SEQ ID NO: 1213 - DNA, 24 bp, Artificial Sequence
  Description of Artificial Sequence:  Hypothetical Probe Sequence
ccattctgaggatgcgggacggac

SEQ ID NO: 1214 - DNA, 24 bp, Artificial Sequence
  Description of Artificial Sequence:  Hypothetical Probe Sequence
ccattctgagcctgtcatcgcgaa

SEQ ID NO: 1215 - DNA, 24 bp, Artificial Sequence
  Description of Artificial Sequence:  Hypothetical Probe Sequence
ccattgtcatcgccatgaccgtgc

SEQ ID NO: 1216 - DNA, 24 bp, Artificial Sequence
  Description of Artificial Sequence:  Hypothetical Probe Sequence
ccattgtctgcgccatcgttggac

SEQ ID NO: 1217 - DNA, 24 bp, Artificial Sequence
  Description of Artificial Sequence:  Hypothetical Probe Sequence
ccattgtcacggccatgatggacc

SEQ ID NO: 1218 - DNA, 24 bp, Artificial Sequence
  Description of Artificial Sequence:  Hypothetical Probe Sequence
ccattcgtgctttacaagccacgg

SEQ ID NO: 1219 - DNA, 24 bp, Artificial Sequence
  Description of Artificial Sequence:  Hypothetical Probe Sequence
ccatcttgcgaattaggtgctccc

SEQ ID NO: 1220 - DNA, 24 bp, Artificial Sequence
  Description of Artificial Sequence:  Hypothetical Probe Sequence
ccatcgttctcatccctgcgtgcg

SEQ ID NO: 1221 - DNA, 24 bp, Artificial Sequence
  Description of Artificial Sequence:  Hypothetical Probe Sequence
ccatcgttgcaaatacatcgtgcg

SEQ ID NO: 1222 - DNA, 24 bp, Artificial Sequence
  Description of Artificial Sequence:  Hypothetical Probe Sequence
ccatcgttacctagccaccttgcg

SEQ ID NO: 1223 - DNA, 24 bp, Artificial Sequence
  Description of Artificial Sequence:  Hypothetical Probe Sequence
ccatcgttatcgtgcgaaagctca

SEQ ID NO: 1224 - DNA, 24 bp, Artificial Sequence
  Description of Artificial Sequence:  Hypothetical Probe Sequence
ccatcgttgaccgcttaggatgcg

SEQ ID NO: 1225 - DNA, 24 bp, Artificial Sequence
  Description of Artificial Sequence:  Hypothetical Probe Sequence
ccatcgttgtgccctaggacggac

SEQ ID NO: 1226 - DNA, 24 bp, Artificial Sequence
  Description of Artificial Sequence:  Hypothetical Probe Sequence
ccatctcaacggcacgagcctgat

SEQ ID NO: 1227 - DNA, 24 bp, Artificial Sequence
  Description of Artificial Sequence:  Hypothetical Probe Sequence
ccatctgttcgtgcaatcgttgcg

SEQ ID NO: 1228 - DNA, 24 bp, Artificial Sequence
  Description of Artificial Sequence:  Hypothetical Probe Sequence
ccatctgttcccggtacacgtccc

SEQ ID NO: 1229 - DNA, 24 bp, Artificial Sequence
  Description of Artificial Sequence:  Hypothetical Probe Sequence
ccatctgtgtgcgtgcgatgtgcg

SEQ ID NO: 1230 - DNA, 24 bp, Artificial Sequence
  Description of Artificial Sequence:  Hypothetical Probe Sequence
ccatccatcctacagctgcgcagc

SEQ ID NO: 1231 - DNA, 24 bp, Artificial Sequence
  Description of Artificial Sequence:  Hypothetical Probe Sequence
ccatccatggacgacctgcgacct

SEQ ID NO: 1232 - DNA, 24 bp, Artificial Sequence
  Description of Artificial Sequence:  Hypothetical Probe Sequence
ccatcgaatcgtcgttgatggcaa

SEQ ID NO: 1233 - DNA, 24 bp, Artificial Sequence
  Description of Artificial Sequence:  Hypothetical Probe Sequence
ccatcgaacgttcacgagtgcagc

SEQ ID NO: 1234 - DNA, 24 bp, Artificial Sequence
  Description of Artificial Sequence:  Hypothetical Probe Sequence
ccatcgaacgaacctacgaatgcg

SEQ ID NO: 1235 - DNA, 24 bp, Artificial Sequence
  Description of Artificial Sequence:  Hypothetical Probe Sequence
ccatcgaaaccttgtcgaccacgg

SEQ ID NO: 1236 - DNA, 24 bp, Artificial Sequence
  Description of Artificial Sequence:  Hypothetical Probe Sequence
ccatcgaacagcccattcgtcacg

SEQ ID NO: 1237 - DNA, 24 bp, Artificial Sequence
  Description of Artificial Sequence:  Hypothetical Probe Sequence
ccatgcttctcaacggcagcatcg

SEQ ID NO: 1238 - DNA, 24 bp, Artificial Sequence
  Description of Artificial Sequence:  Hypothetical Probe Sequence
ccatgcttaggaaggaatcgcgtt

SEQ ID NO: 1239 - DNA, 24 bp, Artificial Sequence
  Description of Artificial Sequence:  Hypothetical Probe Sequence
ccatgcttcagctacatcccgtgc

SEQ ID NO: 1240 - DNA, 24 bp, Artificial Sequence
  Description of Artificial Sequence:  Hypothetical Probe Sequence
ccatgcttgacccgaagcttcagc

SEQ ID NO: 1241 - DNA, 24 bp, Artificial Sequence
  Description of Artificial Sequence:  Hypothetical Probe Sequence
ccatgcttgtgcgaccgaccttga

SEQ ID NO: 1242 - DNA, 24 bp, Artificial Sequence
  Description of Artificial Sequence:  Hypothetical Probe Sequence
ccatggtagcttgcaaatcgcgaa

SEQ ID NO: 1243 - DNA, 24 bp, Artificial Sequence
  Description of Artificial Sequence:  Hypothetical Probe Sequence
ccatggtacagctgcgacggggta

SEQ ID NO: 1244 - DNA, 24 bp, Artificial Sequence
  Description of Artificial Sequence:  Hypothetical Probe Sequence
ccatggtagtgcacggagccgtgc

SEQ ID NO: 1245 - DNA, 24 bp, Artificial Sequence
  Description of Artificial Sequence:  Hypothetical Probe Sequence
ccatgtctcacgtgcgcttgtccc

SEQ ID NO: 1246 - DNA, 24 bp, Artificial Sequence
  Description of Artificial Sequence:  Hypothetical Probe Sequence
ccatgcaatcgtgcaaatcgagga

SEQ ID NO: 1247 - DNA, 24 bp, Artificial Sequence
  Description of Artificial Sequence:  Hypothetical Probe Sequence
ccatgcaacgaatcccaatcccta

SEQ ID NO: 1248 - DNA, 24 bp, Artificial Sequence
  Description of Artificial Sequence:  Hypothetical Probe Sequence
ccatgcaagtcttcccagccggac

SEQ ID NO: 1249 - DNA, 24 bp, Artificial Sequence
  Description of Artificial Sequence:  Hypothetical Probe Sequence
ccatgcaagagttccccagccacg

SEQ ID NO: 1250 - DNA, 24 bp, Artificial Sequence
  Description of Artificial Sequence:  Hypothetical Probe Sequence
ccatgcaaatcgttagggacgtgc

SEQ ID NO: 1251 - DNA, 24 bp, Artificial Sequence
  Description of Artificial Sequence:  Hypothetical Probe Sequence
ccatgcaacacgatcgatcggatg

SEQ ID NO: 1252 - DNA, 24 bp, Artificial Sequence
  Description of Artificial Sequence:  Hypothetical Probe Sequence
ccatgcaagacccgttagccccta

SEQ ID NO: 1253 - DNA, 24 bp, Artificial Sequence
  Description of Artificial Sequence:  Hypothetical Probe Sequence
ccatgcaaggacgagttccctctg

SEQ ID NO: 1254 - DNA, 24 bp, Artificial Sequence
  Description of Artificial Sequence:  Hypothetical Probe Sequence
ccatgcaaagccctcagcaagtgc

SEQ ID NO: 1255 - DNA, 24 bp, Artificial Sequence
  Description of Artificial Sequence:  Hypothetical Probe Sequence
ccatagtggacccttgctgttgcg

SEQ ID NO: 1256 - DNA, 24 bp, Artificial Sequence
  Description of Artificial Sequence:  Hypothetical Probe Sequence
ccataccttcccataccagctgcg

SEQ ID NO: 1257 - DNA, 24 bp, Artificial Sequence
  Description of Artificial Sequence:  Hypothetical Probe Sequence
ccatatcgggtatctggaccacgg

SEQ ID NO: 1258 - DNA, 24 bp, Artificial Sequence
  Description of Artificial Sequence:  Hypothetical Probe Sequence
ccatatcggagtgatgtgcgggac

SEQ ID NO: 1259 - DNA, 24 bp, Artificial Sequence
  Description of Artificial Sequence:  Hypothetical Probe Sequence
ccatatcgtccccgttcacgagga

SEQ ID NO: 1260 - DNA, 24 bp, Artificial Sequence
  Description of Artificial Sequence:  Hypothetical Probe Sequence
ccataggaaggatccccacgcacg

SEQ ID NO: 1261 - DNA, 24 bp, Artificial Sequence
  Description of Artificial Sequence:  Hypothetical Probe Sequence
ccatgatgcgttcagcgtctagcc

SEQ ID NO: 1262 - DNA, 24 bp, Artificial Sequence
  Description of Artificial Sequence:  Hypothetical Probe Sequence
ccatgatgatcggatggtgcacgg

SEQ ID NO: 1263 - DNA, 24 bp, Artificial Sequence
  Description of Artificial Sequence:  Hypothetical Probe Sequence
ccatgatgcctaggacgacccttg

SEQ ID NO: 1264 - DNA, 24 bp, Artificial Sequence
  Description of Artificial Sequence:  Hypothetical Probe Sequence
ccatgatgtcccgatgcgaacagc

SEQ ID NO: 1265 - DNA, 24 bp, Artificial Sequence
  Description of Artificial Sequence:  Hypothetical Probe Sequence
ccatgatgcagccacgccatctgt

SEQ ID NO: 1266 - DNA, 24 bp, Artificial Sequence
  Description of Artificial Sequence:  Hypothetical Probe Sequence
ccattcccttagcgttcagcccat

SEQ ID NO: 1267 - DNA, 24 bp, Artificial Sequence
  Description of Artificial Sequence:  Hypothetical Probe Sequence
ccattcccctcaacgggatgtctg

SEQ ID NO: 1268 - DNA, 24 bp, Artificial Sequence
  Description of Artificial Sequence:  Hypothetical Probe Sequence
ccattcccacctagtgcacgccat

SEQ ID NO: 1269 - DNA, 24 bp, Artificial Sequence
  Description of Artificial Sequence:  Hypothetical Probe Sequence
ccattgcgtgataatccttggcaa

SEQ ID NO: 1270 - DNA, 24 bp, Artificial Sequence
  Description of Artificial Sequence:  Hypothetical Probe Sequence
ccattgcgttagcgtttcccggta

SEQ ID NO: 1271 - DNA, 24 bp, Artificial Sequence
  Description of Artificial Sequence:  Hypothetical Probe Sequence
ccattgcgtgtcggtaaaagtgcg

SEQ ID NO: 1272 - DNA, 24 bp, Artificial Sequence
  Description of Artificial Sequence:  Hypothetical Probe Sequence
ccattgcgtcgtaaagtcccatcg

SEQ ID NO: 1273 - DNA, 24 bp, Artificial Sequence
  Description of Artificial Sequence:  Hypothetical Probe Sequence
ccattgcgaggacacggagtgtgc

SEQ ID NO: 1274 - DNA, 24 bp, Artificial Sequence
  Description of Artificial Sequence:  Hypothetical Probe Sequence
ccattgcgtgcgaatccagcagtg

SEQ ID NO: 1275 - DNA, 24 bp, Artificial Sequence
  Description of Artificial Sequence:  Hypothetical Probe Sequence
ccattgcgcacggcaagagtcgaa

SEQ ID NO: 1276 - DNA, 24 bp, Artificial Sequence
  Description of Artificial Sequence:  Hypothetical Probe Sequence
ccattgcggacccacgtctggatg

SEQ ID NO: 1277 - DNA, 24 bp, Artificial Sequence
  Description of Artificial Sequence:  Hypothetical Probe Sequence
ccattgcggtgcggaccgttagtg

SEQ ID NO: 1278 - DNA, 24 bp, Artificial Sequence
  Description of Artificial Sequence:  Hypothetical Probe Sequence
ccattgcgacggccatatcgacct

SEQ ID NO: 1279 - DNA, 24 bp, Artificial Sequence
  Description of Artificial Sequence:  Hypothetical Probe Sequence
ccatcacgttgaagcctgcggctt

SEQ ID NO: 1280 - DNA, 24 bp, Artificial Sequence
  Description of Artificial Sequence:  Hypothetical Probe Sequence
ccatcacgtctggcaatcccagcc

SEQ ID NO: 1281 - DNA, 24 bp, Artificial Sequence
  Description of Artificial Sequence:  Hypothetical Probe Sequence
ccatcacgagtgaccttcccccat

SEQ ID NO: 1282 - DNA, 24 bp, Artificial Sequence
  Description of Artificial Sequence:  Hypothetical Probe Sequence
ccatcacgatcggcttttgatgcg

SEQ ID NO: 1283 - DNA, 24 bp, Artificial Sequence
  Description of Artificial Sequence:  Hypothetical Probe Sequence
ccatcacgtgcgaaagatcgagcc

SEQ ID NO: 1284 - DNA, 24 bp, Artificial Sequence
  Description of Artificial Sequence:  Hypothetical Probe Sequence
ccatcacggaccgagtgctttgcg

SEQ ID NO: 1285 - DNA, 24 bp, Artificial Sequence
  Description of Artificial Sequence:  Hypothetical Probe Sequence
ccatcacgagccgatgagtgcacg

SEQ ID NO: 1286 - DNA, 24 bp, Artificial Sequence
  Description of Artificial Sequence:  Hypothetical Probe Sequence
ccatcagcttgatcccccatcagc

SEQ ID NO: 1287 - DNA, 24 bp, Artificial Sequence
  Description of Artificial Sequence:  Hypothetical Probe Sequence
ccatcagccttgggaccgttctca

SEQ ID NO: 1288 - DNA, 24 bp, Artificial Sequence
  Description of Artificial Sequence:  Hypothetical Probe Sequence
ccatcagccgttttagtcccccat

SEQ ID NO: 1289 - DNA, 24 bp, Artificial Sequence
  Description of Artificial Sequence:  Hypothetical Probe Sequence
ccatcagcagtggcaagtgcagcc

SEQ ID NO: 1290 - DNA, 24 bp, Artificial Sequence
  Description of Artificial Sequence:  Hypothetical Probe Sequence
ccatcagcacctttagtgcggacc

SEQ ID NO: 1291 - DNA, 24 bp, Artificial Sequence
  Description of Artificial Sequence:  Hypothetical Probe Sequence
ccatcagctcccaggagaccccta

SEQ ID NO: 1292 - DNA, 24 bp, Artificial Sequence
  Description of Artificial Sequence:  Hypothetical Probe Sequence
ccatgaccgagtaggaacggtgcg

SEQ ID NO: 1293 - DNA, 24 bp, Artificial Sequence
  Description of Artificial Sequence:  Hypothetical Probe Sequence
ccatgaccaggaaatctcccgacc

SEQ ID NO: 1294 - DNA, 24 bp, Artificial Sequence
  Description of Artificial Sequence:  Hypothetical Probe Sequence
ccatgaccgatgcttggcttcgaa

SEQ ID NO: 1295 - DNA, 24 bp, Artificial Sequence
  Description of Artificial Sequence:  Hypothetical Probe Sequence
ccatgacctcccggtagtcttgcg

SEQ ID NO: 1296 - DNA, 24 bp, Artificial Sequence
  Description of Artificial Sequence:  Hypothetical Probe Sequence
ccatgaccagccgagtgcaatccc

SEQ ID NO: 1297 - DNA, 24 bp, Artificial Sequence
  Description of Artificial Sequence:  Hypothetical Probe Sequence
ccatgtgctgatacctgtgcgcaa

SEQ ID NO: 1298 - DNA, 24 bp, Artificial Sequence
  Description of Artificial Sequence:  Hypothetical Probe Sequence
ccatgtgcaatctgcgacgggacc

SEQ ID NO: 1299 - DNA, 24 bp, Artificial Sequence
  Description of Artificial Sequence:  Hypothetical Probe Sequence
ccatgtgctctgcgttggacgctt

SEQ ID NO: 1300 - DNA, 24 bp, Artificial Sequence
  Description of Artificial Sequence:  Hypothetical Probe Sequence
ccatgtgcctgtcgtttgtcacgg

SEQ ID NO: 1301 - DNA, 24 bp, Artificial Sequence
  Description of Artificial Sequence:  Hypothetical Probe Sequence
ccatgtgcgcttcgttaatcccat

SEQ ID NO: 1302 - DNA, 24 bp, Artificial Sequence
  Description of Artificial Sequence:  Hypothetical Probe Sequence
ccatgtgcatcgggtaaccttccc

SEQ ID NO: 1303 - DNA, 24 bp, Artificial Sequence
  Description of Artificial Sequence:  Hypothetical Probe Sequence
ccatgtgcaggaatactccccgtt

SEQ ID NO: 1304 - DNA, 24 bp, Artificial Sequence
  Description of Artificial Sequence:  Hypothetical Probe Sequence
ccatgtgctgcgggactctggacc

SEQ ID NO: 1305 - DNA, 24 bp, Artificial Sequence
  Description of Artificial Sequence:  Hypothetical Probe Sequence
ccatgtgcgacccctacctatgcg

SEQ ID NO: 1306 - DNA, 24 bp, Artificial Sequence
  Description of Artificial Sequence:  Hypothetical Probe Sequence
ccatgtgcagcccacgaaagctca

SEQ ID NO: 1307 - DNA, 24 bp, Artificial Sequence
  Description of Artificial Sequence:  Hypothetical Probe Sequence
ccatggacggtactcatgcgatcg

SEQ ID NO: 1308 - DNA, 24 bp, Artificial Sequence
  Description of Artificial Sequence:  Hypothetical Probe Sequence
ccatggacaggacacgaggacgaa

SEQ ID NO: 1309 - DNA, 24 bp, Artificial Sequence
  Description of Artificial Sequence:  Hypothetical Probe Sequence
ccatggaccacggtctcacgggac

SEQ ID NO: 1310 - DNA, 24 bp, Artificial Sequence
  Description of Artificial Sequence:  Hypothetical Probe Sequence
ccatggacgtgccagcttgagcaa

SEQ ID NO: 1311 - DNA, 24 bp, Artificial Sequence
  Description of Artificial Sequence:  Hypothetical Probe Sequence
ccatacggaatcgcaatgcgagcc

SEQ ID NO: 1312 - DNA, 24 bp, Artificial Sequence
  Description of Artificial Sequence:  Hypothetical Probe Sequence
ccatacggtctggcaaagccgcaa

SEQ ID NO: 1313 - DNA, 24 bp, Artificial Sequence
  Description of Artificial Sequence:  Hypothetical Probe Sequence
ccatacggcttgcctatcccggta

SEQ ID NO: 1314 - DNA, 24 bp, Artificial Sequence
  Description of Artificial Sequence:  Hypothetical Probe Sequence
ccatacgggcaatctgagtgcacg

SEQ ID NO: 1315 - DNA, 24 bp, Artificial Sequence
  Description of Artificial Sequence:  Hypothetical Probe Sequence
ccatacgggaccctgtagccggta

SEQ ID NO: 1316 - DNA, 24 bp, Artificial Sequence
  Description of Artificial Sequence:  Hypothetical Probe Sequence
ccatacgggtgctcgtccatcgtt

SEQ ID NO: 1317 - DNA, 24 bp, Artificial Sequence
  Description of Artificial Sequence:  Hypothetical Probe Sequence
ccatagccgtgcgcaacgaacttg

SEQ ID NO: 1318 - DNA, 24 bp, Artificial Sequence
  Description of Artificial Sequence:  Hypothetical Probe Sequence
cgaatgattgcgccattgatgcaa

SEQ ID NO: 1319 - DNA, 24 bp, Artificial Sequence
  Description of Artificial Sequence:  Hypothetical Probe Sequence
cgaatgatcacgctgtacgggcaa

SEQ ID NO: 1320 - DNA, 24 bp, Artificial Sequence
  Description of Artificial Sequence:  Hypothetical Probe Sequence
cgaaaatccacgacggttgacacg

SEQ ID NO: 1321 - DNA, 24 bp, Artificial Sequence
  Description of Artificial Sequence:  Hypothetical Probe Sequence
cgaaaatcgtgcctgttgcggtct

SEQ ID NO: 1322 - DNA, 24 bp, Artificial Sequence
  Description of Artificial Sequence:  Hypothetical Probe Sequence
cgaaaatcggacttgatgcgcttg

SEQ ID NO: 1323 - DNA, 24 bp, Artificial Sequence
  Description of Artificial Sequence:  Hypothetical Probe Sequence
cgaaatacgctttcccgcaatgcg

SEQ ID NO: 1324 - DNA, 24 bp, Artificial Sequence
  Description of Artificial Sequence:  Hypothetical Probe Sequence
cgaaaaagcgaaatcgttgatgcg

SEQ ID NO: 1325 - DNA, 24 bp, Artificial Sequence
  Description of Artificial Sequence:  Hypothetical Probe Sequence
cgaaaaagtccctgcggagtttga

SEQ ID NO: 1326 - DNA, 24 bp, Artificial Sequence
  Description of Artificial Sequence:  Hypothetical Probe Sequence
cgaaaaagcacgaaagccatagcc

SEQ ID NO: 1327 - DNA, 24 bp, Artificial Sequence
  Description of Artificial Sequence:  Hypothetical Probe Sequence
cgaaaaagcagcggacctcaagga

SEQ ID NO: 1328 - DNA, 24 bp, Artificial Sequence
  Description of Artificial Sequence:  Hypothetical Probe Sequence
cgaaaaaggtgccacgcagctgtc

SEQ ID NO: 1329 - DNA, 24 bp, Artificial Sequence
  Description of Artificial Sequence:  Hypothetical Probe Sequence
cgaaaaagagccgtgcctcagtgc

SEQ ID NO: 1330 - DNA, 24 bp, Artificial Sequence
  Description of Artificial Sequence:  Hypothetical Probe Sequence
cgaatctgtcgttgcgcgaaagcc

SEQ ID NO: 1331 - DNA, 24 bp, Artificial Sequence
  Description of Artificial Sequence:  Hypothetical Probe Sequence
cgaatctgccataggagaccacgg

SEQ ID NO: 1332 - DNA, 24 bp, Artificial Sequence
  Description of Artificial Sequence:  Hypothetical Probe Sequence
cgaatctgcacgtacacagccacg

SEQ ID NO: 1333 - DNA, 24 bp, Artificial Sequence
  Description of Artificial Sequence:  Hypothetical Probe Sequence
cgaatgtcctcaagccgtgcccat

SEQ ID NO: 1334 - DNA, 24 bp, Artificial Sequence
  Description of Artificial Sequence:  Hypothetical Probe Sequence
cgaatgtcgtctctgttgcgagcc

SEQ ID NO: 1335 - DNA, 24 bp, Artificial Sequence
  Description of Artificial Sequence:  Hypothetical Probe Sequence
cgaatcgtctgtcagcgcaacagc

SEQ ID NO: 1336 - DNA, 24 bp, Artificial Sequence
  Description of Artificial Sequence:  Hypothetical Probe Sequence
cgaatcgtgcttccatagccatcg

SEQ ID NO: 1337 - DNA, 24 bp, Artificial Sequence
  Description of Artificial Sequence:  Hypothetical Probe Sequence
cgaacttgtcgtgacccagccacg

SEQ ID NO: 1338 - DNA, 24 bp, Artificial Sequence
  Description of Artificial Sequence:  Hypothetical Probe Sequence
cgaacttggcttgacccacgatcg

SEQ ID NO: 1339 - DNA, 24 bp, Artificial Sequence
  Description of Artificial Sequence:  Hypothetical Probe Sequence
cgaacttgcagcagtggatgcgaa

SEQ ID NO: 1340 - DNA, 24 bp, Artificial Sequence
  Description of Artificial Sequence:  Hypothetical Probe Sequence
cgaacttggacccttgtgcgctgt

SEQ ID NO: 1341 - DNA, 24 bp, Artificial Sequence
  Description of Artificial Sequence:  Hypothetical Probe Sequence
cgaacttggtgccagccgttgatg

SEQ ID NO: 1342 - DNA, 24 bp, Artificial Sequence
  Description of Artificial Sequence:  Hypothetical Probe Sequence
cgaacttgagccgatggagtcacg

SEQ ID NO: 1343 - DNA, 24 bp, Artificial Sequence
  Description of Artificial Sequence:  Hypothetical Probe Sequence
cgaacgttgagtcgaacacgatcg

SEQ ID NO: 1344 - DNA, 24 bp, Artificial Sequence
  Description of Artificial Sequence:  Hypothetical Probe Sequence
cgaacgttgtgctctgcagcttga

SEQ ID NO: 1345 - DNA, 24 bp, Artificial Sequence
  Description of Artificial Sequence:  Hypothetical Probe Sequence
cgaactcaccatgcaaacggcgtt

SEQ ID NO: 1346 - DNA, 24 bp, Artificial Sequence
  Description of Artificial Sequence:  Hypothetical Probe Sequence
cgaactcagctttgcgaggatgcg

SEQ ID NO: 1347 - DNA, 24 bp, Artificial Sequence
  Description of Artificial Sequence:  Hypothetical Probe Sequence
cgaactcatcccatacgcaagcaa

SEQ ID NO: 1348 - DNA, 24 bp, Artificial Sequence
  Description of Artificial Sequence:  Hypothetical Probe Sequence
cgaactcacagccagcgcttgtgc

SEQ ID NO: 1349 - DNA, 24 bp, Artificial Sequence
  Description of Artificial Sequence:  Hypothetical Probe Sequence
cgaaccatcgaaccatgaccggac

SEQ ID NO: 1350 - DNA, 24 bp, Artificial Sequence
  Description of Artificial Sequence:  Hypothetical Probe Sequence
cgaaccatatcgagtgcagcggac

SEQ ID NO: 1351 - DNA, 24 bp, Artificial Sequence
  Description of Artificial Sequence:  Hypothetical Probe Sequence
cgaaccatcctaaatccgtttgcg

SEQ ID NO: 1352 - DNA, 24 bp, Artificial Sequence
  Description of Artificial Sequence:  Hypothetical Probe Sequence
cgaaccatcacgttaggcaagcaa

SEQ ID NO: 1353 - DNA, 24 bp, Artificial Sequence
  Description of Artificial Sequence:  Hypothetical Probe Sequence
cgaaccatggacctcatccctccc

SEQ ID NO: 1354 - DNA, 24 bp, Artificial Sequence
  Description of Artificial Sequence:  Hypothetical Probe Sequence
cgaacgaaaaagaccttgcggcaa

SEQ ID NO: 1355 - DNA, 24 bp, Artificial Sequence
  Description of Artificial Sequence:  Hypothetical Probe Sequence
cgaacgaatcgtttagcgttgcaa

SEQ ID NO: 1356 - DNA, 24 bp, Artificial Sequence
  Description of Artificial Sequence:  Hypothetical Probe Sequence
cgaagctttgatcacgcgttgacc

SEQ ID NO: 1357 - DNA, 24 bp, Artificial Sequence
  Description of Artificial Sequence:  Hypothetical Probe Sequence
cgaagctttacatgcgttgatgcg

SEQ ID NO: 1358 - DNA, 24 bp, Artificial Sequence
  Description of Artificial Sequence:  Hypothetical Probe Sequence
cgaagcttcgttcgaaggacagga

SEQ ID NO: 1359 - DNA, 24 bp, Artificial Sequence
  Description of Artificial Sequence:  Hypothetical Probe Sequence
cgaagcttcgaatcgtgcaaccat

SEQ ID NO: 1360 - DNA, 24 bp, Artificial Sequence
  Description of Artificial Sequence:  Hypothetical Probe Sequence
cgaagcttgtgcggacaaagttga

SEQ ID NO: 1361 - DNA, 24 bp, Artificial Sequence
  Description of Artificial Sequence:  Hypothetical Probe Sequence
cgaagagtccatacggtcccagcc

SEQ ID NO: 1362 - DNA, 24 bp, Artificial Sequence
  Description of Artificial Sequence:  Hypothetical Probe Sequence
cgaagcaattgaaccttgcgggac

SEQ ID NO: 1363 - DNA, 24 bp, Artificial Sequence
  Description of Artificial Sequence:  Hypothetical Probe Sequence
cgaagcaaaatcagccacctacgg

SEQ ID NO: 1364 - DNA, 24 bp, Artificial Sequence
  Description of Artificial Sequence:  Hypothetical Probe Sequence
cgaagcaaaaagccatcgtttgcg

SEQ ID NO: 1365 - DNA, 24 bp, Artificial Sequence
  Description of Artificial Sequence:  Hypothetical Probe Sequence
cgaagcaaccatacggcgttagtg

SEQ ID NO: 1366 - DNA, 24 bp, Artificial Sequence
  Description of Artificial Sequence:  Hypothetical Probe Sequence
cgaagcaagatgagcctgtccacg

SEQ ID NO: 1367 - DNA, 24 bp, Artificial Sequence
  Description of Artificial Sequence:  Hypothetical Probe Sequence
cgaaagtgcttggcaacgttcacg

SEQ ID NO: 1368 - DNA, 24 bp, Artificial Sequence
  Description of Artificial Sequence:  Hypothetical Probe Sequence
cgaaagtgcgtttgcgtctggtgc

SEQ ID NO: 1369 - DNA, 24 bp, Artificial Sequence
  Description of Artificial Sequence:  Hypothetical Probe Sequence
cgaaagtgcgaatgtcagtgcgaa

SEQ ID NO: 1370 - DNA, 24 bp, Artificial Sequence
  Description of Artificial Sequence:  Hypothetical Probe Sequence
cgaaagtggcttggactcgttccc

SEQ ID NO: 1371 - DNA, 24 bp, Artificial Sequence
  Description of Artificial Sequence:  Hypothetical Probe Sequence
cgaaagtggatggacccagctgcg

SEQ ID NO: 1372 - DNA, 24 bp, Artificial Sequence
  Description of Artificial Sequence:  Hypothetical Probe Sequence
cgaaacctgagtacggtgcgcgtt

SEQ ID NO: 1373 - DNA, 24 bp, Artificial Sequence
  Description of Artificial Sequence:  Hypothetical Probe Sequence
cgaaacctgcaactgtggtatgcg

SEQ ID NO: 1374 - DNA, 24 bp, Artificial Sequence
  Description of Artificial Sequence:  Hypothetical Probe Sequence
cgaaaccttgcgggtaacctcgaa

SEQ ID NO: 1375 - DNA, 24 bp, Artificial Sequence
  Description of Artificial Sequence:  Hypothetical Probe Sequence
cgaaacctgaccttgatgcgcagc

SEQ ID NO: 1376 - DNA, 24 bp, Artificial Sequence
  Description of Artificial Sequence:  Hypothetical Probe Sequence
cgaaacctgtgcgtctgaccggac

SEQ ID NO: 1377 - DNA, 24 bp, Artificial Sequence
  Description of Artificial Sequence:  Hypothetical Probe Sequence
cgaaatcggagttctgccattgcg

SEQ ID NO: 1378 - DNA, 24 bp, Artificial Sequence
  Description of Artificial Sequence:  Hypothetical Probe Sequence
cgaaaggaagtgcacggatgagcc

SEQ ID NO: 1379 - DNA, 24 bp, Artificial Sequence
  Description of Artificial Sequence:  Hypothetical Probe Sequence
cgaaaggatcccggtaggacgacc

SEQ ID NO: 1380 - DNA, 24 bp, Artificial Sequence
  Description of Artificial Sequence:  Hypothetical Probe Sequence
cgaaaggaagccagcctgtcgatg

SEQ ID NO: 1381 - DNA, 24 bp, Artificial Sequence
  Description of Artificial Sequence:  Hypothetical Probe Sequence
cgaacctagcaatgtcgcaagcaa

SEQ ID NO: 1382 - DNA, 24 bp, Artificial Sequence
  Description of Artificial Sequence:  Hypothetical Probe Sequence
cgaacctagtgcaatcagccgctt

SEQ ID NO: 1383 - DNA, 24 bp, Artificial Sequence
  Description of Artificial Sequence:  Hypothetical Probe Sequence
cgaagatgtcgttgcgacggtccc

SEQ ID NO: 1384 - DNA, 24 bp, Artificial Sequence
  Description of Artificial Sequence:  Hypothetical Probe Sequence
cgaagatggtctatcgagcccgaa

SEQ ID NO: 1385 - DNA, 24 bp, Artificial Sequence
  Description of Artificial Sequence:  Hypothetical Probe Sequence
cgaagatgtcccctcaagccatcg

SEQ ID NO: 1386 - DNA, 24 bp, Artificial Sequence
  Description of Artificial Sequence:  Hypothetical Probe Sequence
cgaagatgcacgctgtgcaacgtt

SEQ ID NO: 1387 - DNA, 24 bp, Artificial Sequence
  Description of Artificial Sequence:  Hypothetical Probe Sequence
cgaagatgggactcccacggggta

SEQ ID NO: 1388 - DNA, 24 bp, Artificial Sequence
  Description of Artificial Sequence:  Hypothetical Probe Sequence
cgaagatgagcctgatgtgcgcaa

SEQ ID NO: 1389 - DNA, 24 bp, Artificial Sequence
  Description of Artificial Sequence:  Hypothetical Probe Sequence
cgaatccctgtccagcaatcgctt

SEQ ID NO: 1390 - DNA, 24 bp, Artificial Sequence
  Description of Artificial Sequence:  Hypothetical Probe Sequence
cgaatcccgatgatacgaccggac

SEQ ID NO: 1391 - DNA, 24 bp, Artificial Sequence
  Description of Artificial Sequence:  Hypothetical Probe Sequence
cgaatccccacgaatcagtgtgcg

SEQ ID NO: 1392 - DNA, 24 bp, Artificial Sequence
  Description of Artificial Sequence:  Hypothetical Probe Sequence
cgaatccccagcgtgctgatcgaa

SEQ ID NO: 1393 - DNA, 24 bp, Artificial Sequence
  Description of Artificial Sequence:  Hypothetical Probe Sequence
cgaatcccacggatcgtcgtggta

SEQ ID NO: 1394 - DNA, 24 bp, Artificial Sequence
  Description of Artificial Sequence:  Hypothetical Probe Sequence
cgaatgcgtgatcagcaaaggctt

SEQ ID NO: 1395 - DNA, 24 bp, Artificial Sequence
  Description of Artificial Sequence:  Hypothetical Probe Sequence
cgaatgcgtacacagcgtgccagc

SEQ ID NO: 1396 - DNA, 24 bp, Artificial Sequence
  Description of Artificial Sequence:  Hypothetical Probe Sequence
cgaatgcgcgaacagcaggatgat

SEQ ID NO: 1397 - DNA, 24 bp, Artificial Sequence
  Description of Artificial Sequence:  Hypothetical Probe Sequence
cgaatgcgcagctacagacccacg

SEQ ID NO: 1398 - DNA, 24 bp, Artificial Sequence
  Description of Artificial Sequence:  Hypothetical Probe Sequence
cgaacacgtctgtctggtgccgaa

SEQ ID NO: 1399 - DNA, 24 bp, Artificial Sequence
  Description of Artificial Sequence:  Hypothetical Probe Sequence
cgaacacgccattcccaatcccat

SEQ ID NO: 1400 - DNA, 24 bp, Artificial Sequence
  Description of Artificial Sequence:  Hypothetical Probe Sequence
cgaacacggagtttagtccctgcg

SEQ ID NO: 1401 - DNA, 24 bp, Artificial Sequence
  Description of Artificial Sequence:  Hypothetical Probe Sequence
cgaacacgtgcggatggtctgcaa

SEQ ID NO: 1402 - DNA, 24 bp, Artificial Sequence
  Description of Artificial Sequence:  Hypothetical Probe Sequence
cgaacacgcacgcacgttagagcc

SEQ ID NO: 1403 - DNA, 24 bp, Artificial Sequence
  Description of Artificial Sequence:  Hypothetical Probe Sequence
cgaacagcaatcacggacggatcg

SEQ ID NO: 1404 - DNA, 24 bp, Artificial Sequence
  Description of Artificial Sequence:  Hypothetical Probe Sequence
cgaacagctcgtagtgctgttgcg

SEQ ID NO: 1405 - DNA, 24 bp, Artificial Sequence
  Description of Artificial Sequence:  Hypothetical Probe Sequence
cgaacagccttgccatgcaagcaa

SEQ ID NO: 1406 - DNA, 24 bp, Artificial Sequence
  Description of Artificial Sequence:  Hypothetical Probe Sequence
cgaacagcgagtttgatcccacct

SEQ ID NO: 1407 - DNA, 24 bp, Artificial Sequence
  Description of Artificial Sequence:  Hypothetical Probe Sequence
cgaacagcagtgttagcagcagcc

SEQ ID NO: 1408 - DNA, 24 bp, Artificial Sequence
  Description of Artificial Sequence:  Hypothetical Probe Sequence
cgaacagcgatgaaaggtgcgatg

SEQ ID NO: 1409 - DNA, 24 bp, Artificial Sequence
  Description of Artificial Sequence:  Hypothetical Probe Sequence
cgaacagccagcgaccggtactca

SEQ ID NO: 1410 - DNA, 24 bp, Artificial Sequence
  Description of Artificial Sequence:  Hypothetical Probe Sequence
cgaagaccctgtctcagtgcgtgc

SEQ ID NO: 1411 - DNA, 24 bp, Artificial Sequence
  Description of Artificial Sequence:  Hypothetical Probe Sequence
cgaagaccgtctaggatcccctca

SEQ ID NO: 1412 - DNA, 24 bp, Artificial Sequence
  Description of Artificial Sequence:  Hypothetical Probe Sequence
cgaagacctccccctaatcgctgt

SEQ ID NO: 1413 - DNA, 24 bp, Artificial Sequence
  Description of Artificial Sequence:  Hypothetical Probe Sequence
cgaagacctgcgttagctcaagcc

SEQ ID NO: 1414 - DNA, 24 bp, Artificial Sequence
  Description of Artificial Sequence:  Hypothetical Probe Sequence
cgaagtgcggtaaatctcgttgcg

SEQ ID NO: 1415 - DNA, 24 bp, Artificial Sequence
  Description of Artificial Sequence:  Hypothetical Probe Sequence
cgaagtgcaggaagcctcgtctca

SEQ ID NO: 1416 - DNA, 24 bp, Artificial Sequence
  Description of Artificial Sequence:  Hypothetical Probe Sequence
cgaagtgctccccctagatgcgaa

SEQ ID NO: 1417 - DNA, 24 bp, Artificial Sequence
  Description of Artificial Sequence:  Hypothetical Probe Sequence
cgaagtgcagccgatgggactcgt

SEQ ID NO: 1418 - DNA, 24 bp, Artificial Sequence
  Description of Artificial Sequence:  Hypothetical Probe Sequence
cgaaggacgcttgacctgatgcaa

SEQ ID NO: 1419 - DNA, 24 bp, Artificial Sequence
  Description of Artificial Sequence:  Hypothetical Probe Sequence
cgaaggacaccttctgtcccacgg

SEQ ID NO: 1420 - DNA, 24 bp, Artificial Sequence
  Description of Artificial Sequence:  Hypothetical Probe Sequence
cgaaggacgatggagtacgggctt

SEQ ID NO: 1421 - DNA, 24 bp, Artificial Sequence
  Description of Artificial Sequence:  Hypothetical Probe Sequence
cgaaacggtgattccctgtcgacc

SEQ ID NO: 1422 - DNA, 24 bp, Artificial Sequence
  Description of Artificial Sequence:  Hypothetical Probe Sequence
cgaaacggtctgcagcaaagtccc

SEQ ID NO: 1423 - DNA, 24 bp, Artificial Sequence
  Description of Artificial Sequence:  Hypothetical Probe Sequence
cgaaacgggagtggacggtatcgt

SEQ ID NO: 1424 - DNA, 24 bp, Artificial Sequence
  Description of Artificial Sequence:  Hypothetical Probe Sequence
cgaaacggacctaggacgtttcgt

SEQ ID NO: 1425 - DNA, 24 bp, Artificial Sequence
  Description of Artificial Sequence:  Hypothetical Probe Sequence
cgaaacggaggacttgatcgagcc

SEQ ID NO: 1426 - DNA, 24 bp, Artificial Sequence
  Description of Artificial Sequence:  Hypothetical Probe Sequence
cgaaacggcctatcgtgcaagagt

SEQ ID NO: 1427 - DNA, 24 bp, Artificial Sequence
  Description of Artificial Sequence:  Hypothetical Probe Sequence
cgaaacggtgcgctgttcgtcgtt

SEQ ID NO: 1428 - DNA, 24 bp, Artificial Sequence
  Description of Artificial Sequence:  Hypothetical Probe Sequence
cgaaacggacggcacgatcgtgat

SEQ ID NO: 1429 - DNA, 24 bp, Artificial Sequence
  Description of Artificial Sequence:  Hypothetical Probe Sequence
cgaaagcctgatcctatcccggac

SEQ ID NO: 1430 - DNA, 24 bp, Artificial Sequence
  Description of Artificial Sequence:  Hypothetical Probe Sequence
cgaaagcctctggcaacgaaggac

SEQ ID NO: 1431 - DNA, 24 bp, Artificial Sequence
  Description of Artificial Sequence:  Hypothetical Probe Sequence
cgaaagccctcaaatcgatgggac

SEQ ID NO: 1432 - DNA, 24 bp, Artificial Sequence
  Description of Artificial Sequence:  Hypothetical Probe Sequence
cgaaagccacctttagcagctcgt

SEQ ID NO: 1433 - DNA, 24 bp, Artificial Sequence
  Description of Artificial Sequence:  Hypothetical Probe Sequence
cgaaagccatcggtctgatgcgaa

SEQ ID NO: 1434 - DNA, 24 bp, Artificial Sequence
  Description of Artificial Sequence:  Hypothetical Probe Sequence
cgaaagccaggaagtggatggctt

SEQ ID NO: 1435 - DNA, 24 bp, Artificial Sequence
  Description of Artificial Sequence:  Hypothetical Probe Sequence
cgaaagccgatgcgaatgatagcc

SEQ ID NO: 1436 - DNA, 24 bp, Artificial Sequence
  Description of Artificial Sequence:  Hypothetical Probe Sequence
cgaaagccgtgcgatgggacgtct

SEQ ID NO: 1437 - DNA, 24 bp, Artificial Sequence
  Description of Artificial Sequence:  Hypothetical Probe Sequence
gctttgatatcgcttgacgggacc

SEQ ID NO: 1438 - DNA, 24 bp, Artificial Sequence
  Description of Artificial Sequence:  Hypothetical Probe Sequence
gctttgatcagctcccgacctgcg

SEQ ID NO: 1439 - DNA, 24 bp, Artificial Sequence
  Description of Artificial Sequence:  Hypothetical Probe Sequence
gctttgatgaccccattcccgacc

SEQ ID NO: 1440 - DNA, 24 bp, Artificial Sequence
  Description of Artificial Sequence:  Hypothetical Probe Sequence
gcttaatccagcggtatccccacg

SEQ ID NO: 1441 - DNA, 24 bp, Artificial Sequence
  Description of Artificial Sequence:  Hypothetical Probe Sequence
gcttaaagcgtttgcgccatgtgc

SEQ ID NO: 1442 - DNA, 24 bp, Artificial Sequence
  Description of Artificial Sequence:  Hypothetical Probe Sequence
gcttaaagcagcgaccgcttcgtt

SEQ ID NO: 1443 - DNA, 24 bp, Artificial Sequence
  Description of Artificial Sequence:  Hypothetical Probe Sequence
gctttctgcttgacggcttggcaa

SEQ ID NO: 1444 - DNA, 24 bp, Artificial Sequence
  Description of Artificial Sequence:  Hypothetical Probe Sequence
gctttctgctcaggacgctttcgt

SEQ ID NO: 1445 - DNA, 24 bp, Artificial Sequence
  Description of Artificial Sequence:  Hypothetical Probe Sequence
gctttctgctgttccccagcctca

SEQ ID NO: 1446 - DNA, 24 bp, Artificial Sequence
  Description of Artificial Sequence:  Hypothetical Probe Sequence
gctttctgcctaaggatgcgatcg

SEQ ID NO: 1447 - DNA, 24 bp, Artificial Sequence
  Description of Artificial Sequence:  Hypothetical Probe Sequence
gctttctgggacgcaaatcgccta

SEQ ID NO: 1448 - DNA, 24 bp, Artificial Sequence
  Description of Artificial Sequence:  Hypothetical Probe Sequence
gctttgtcgagtgtcttccctgcg

SEQ ID NO: 1449 - DNA, 24 bp, Artificial Sequence
  Description of Artificial Sequence:  Hypothetical Probe Sequence
gctttgtcgaccgcttcgaagcaa

SEQ ID NO: 1450 - DNA, 24 bp, Artificial Sequence
  Description of Artificial Sequence:  Hypothetical Probe Sequence
gctttcgttgtcgtgctgcgctca

SEQ ID NO: 1451 - DNA, 24 bp, Artificial Sequence
  Description of Artificial Sequence:  Hypothetical Probe Sequence
gctttcgtcgttgtgcaggagcaa

SEQ ID NO: 1452 - DNA, 24 bp, Artificial Sequence
  Description of Artificial Sequence:  Hypothetical Probe Sequence
gctttcgtgatgcctatccctgcg

SEQ ID NO: 1453 - DNA, 24 bp, Artificial Sequence
  Description of Artificial Sequence:  Hypothetical Probe Sequence
gctttcgtagccttagtcccgcaa

SEQ ID NO: 1454 - DNA, 24 bp, Artificial Sequence
  Description of Artificial Sequence:  Hypothetical Probe Sequence
gcttcttgccatcttggatgtgcg

SEQ ID NO: 1455 - DNA, 24 bp, Artificial Sequence
  Description of Artificial Sequence:  Hypothetical Probe Sequence
gcttcttggcaaagtgcgttacgg

SEQ ID NO: 1456 - DNA, 24 bp, Artificial Sequence
  Description of Artificial Sequence:  Hypothetical Probe Sequence
gcttcttgatcgacggtcccacgg

SEQ ID NO: 1457 - DNA, 24 bp, Artificial Sequence
  Description of Artificial Sequence:  Hypothetical Probe Sequence
gcttcgttcagccgttgaccagga

SEQ ID NO: 1458 - DNA, 24 bp, Artificial Sequence
  Description of Artificial Sequence:  Hypothetical Probe Sequence
gcttcgttgtgcagcccgaatgtc

SEQ ID NO: 1459 - DNA, 24 bp, Artificial Sequence
  Description of Artificial Sequence:  Hypothetical Probe Sequence
gcttctcagtgcgctttgcgcgtt

SEQ ID NO: 1460 - DNA, 24 bp, Artificial Sequence
  Description of Artificial Sequence:  Hypothetical Probe Sequence
gcttctgtacgggaccgacctgcg

SEQ ID NO: 1461 - DNA, 24 bp, Artificial Sequence
  Description of Artificial Sequence:  Hypothetical Probe Sequence
gcttccattcccgatgtccctccc

SEQ ID NO: 1462 - DNA, 24 bp, Artificial Sequence
  Description of Artificial Sequence:  Hypothetical Probe Sequence
gcttcgaacttggcaatcccgtgc

SEQ ID NO: 1463 - DNA, 24 bp, Artificial Sequence
  Description of Artificial Sequence:  Hypothetical Probe Sequence
gcttcgaactgtgcaaagcccagc

SEQ ID NO: 1464 - DNA, 24 bp, Artificial Sequence
  Description of Artificial Sequence:  Hypothetical Probe Sequence
gcttcgaaagtggcaaacgggatg

SEQ ID NO: 1465 - DNA, 24 bp, Artificial Sequence
  Description of Artificial Sequence:  Hypothetical Probe Sequence
gcttcgaaaggatgcgctgtgatg

SEQ ID NO: 1466 - DNA, 24 bp, Artificial Sequence
  Description of Artificial Sequence:  Hypothetical Probe Sequence
gcttgcttcttgatacagccgcaa

SEQ ID NO: 1467 - DNA, 24 bp, Artificial Sequence
  Description of Artificial Sequence:  Hypothetical Probe Sequence
gcttgctttccctctgagccgagt

SEQ ID NO: 1468 - DNA, 24 bp, Artificial Sequence
  Description of Artificial Sequence:  Hypothetical Probe Sequence
gcttggtagcaagtgcggacgagt

SEQ ID NO: 1469 - DNA, 24 bp, Artificial Sequence
  Description of Artificial Sequence:  Hypothetical Probe Sequence
gcttgagtcgtttcccgaccagcc

SEQ ID NO: 1470 - DNA, 24 bp, Artificial Sequence
  Description of Artificial Sequence:  Hypothetical Probe Sequence
gcttgagtgtgctgcgcttgcacg

SEQ ID NO: 1471 - DNA, 24 bp, Artificial Sequence
  Description of Artificial Sequence:  Hypothetical Probe Sequence
gcttgcaaaaagcacgcgaaagtg

SEQ ID NO: 1472 - DNA, 24 bp, Artificial Sequence
  Description of Artificial Sequence:  Hypothetical Probe Sequence
gcttgcaatcgtctcagcaatgcg

SEQ ID NO: 1473 - DNA, 24 bp, Artificial Sequence
  Description of Artificial Sequence:  Hypothetical Probe Sequence
gcttgcaacgaagtctcagcgcaa

SEQ ID NO: 1474 - DNA, 24 bp, Artificial Sequence
  Description of Artificial Sequence:  Hypothetical Probe Sequence
gcttgcaaacctcacgccatccta

SEQ ID NO: 1475 - DNA, 24 bp, Artificial Sequence
  Description of Artificial Sequence:  Hypothetical Probe Sequence
gcttgcaagatgcagctcccccta

SEQ ID NO: 1476 - DNA, 24 bp, Artificial Sequence
  Description of Artificial Sequence:  Hypothetical Probe Sequence
gcttacctcagctcccagccagcc

SEQ ID NO: 1477 - DNA, 24 bp, Artificial Sequence
  Description of Artificial Sequence:  Hypothetical Probe Sequence
gcttatcgcttgtctggtgctccc

SEQ ID NO: 1478 - DNA, 24 bp, Artificial Sequence
  Description of Artificial Sequence:  Hypothetical Probe Sequence
gcttatcgcctattgaacggcgtt

SEQ ID NO: 1479 - DNA, 24 bp, Artificial Sequence
  Description of Artificial Sequence:  Hypothetical Probe Sequence
gcttatcggaccgacccttgcgtt

SEQ ID NO: 1480 - DNA, 24 bp, Artificial Sequence
  Description of Artificial Sequence:  Hypothetical Probe Sequence
gcttcctacgtttgcgcttgcgaa

SEQ ID NO: 1481 - DNA, 24 bp, Artificial Sequence
  Description of Artificial Sequence:  Hypothetical Probe Sequence
gcttgatggcaaaggacacgacgg

SEQ ID NO: 1482 - DNA, 24 bp, Artificial Sequence
  Description of Artificial Sequence:  Hypothetical Probe Sequence
gcttgatgcacgaaagcgttgctt

SEQ ID NO: 1483 - DNA, 24 bp, Artificial Sequence
  Description of Artificial Sequence:  Hypothetical Probe Sequence
gcttgatggtgcataccgtttccc

SEQ ID NO: 1484 - DNA, 24 bp, Artificial Sequence
  Description of Artificial Sequence:  Hypothetical Probe Sequence
gctttcccatcggtctgacctccc

SEQ ID NO: 1485 - DNA, 24 bp, Artificial Sequence
  Description of Artificial Sequence:  Hypothetical Probe Sequence
gctttcccgaccggtatgtcgcaa

SEQ ID NO: 1486 - DNA, 24 bp, Artificial Sequence
  Description of Artificial Sequence:  Hypothetical Probe Sequence
gctttgcgtacaacgggcaatccc

SEQ ID NO: 1487 - DNA, 24 bp, Artificial Sequence
  Description of Artificial Sequence:  Hypothetical Probe Sequence
gctttgcgcgaagagtatcggcaa

SEQ ID NO: 1488 - DNA, 24 bp, Artificial Sequence
  Description of Artificial Sequence:  Hypothetical Probe Sequence
gctttgcgggtaaatcgagtacgg

SEQ ID NO: 1489 - DNA, 24 bp, Artificial Sequence
  Description of Artificial Sequence:  Hypothetical Probe Sequence
gctttgcgagtgggaccttgagcc

SEQ ID NO: 1490 - DNA, 24 bp, Artificial Sequence
  Description of Artificial Sequence:  Hypothetical Probe Sequence
gctttgcgatcggcaatcccttag

SEQ ID NO: 1491 - DNA, 24 bp, Artificial Sequence
  Description of Artificial Sequence:  Hypothetical Probe Sequence
gctttgcgacggtgtcaaaggcaa

SEQ ID NO: 1492 - DNA, 24 bp, Artificial Sequence
  Description of Artificial Sequence:  Hypothetical Probe Sequence
gcttcacgtgtccacgtccccacg

SEQ ID NO: 1493 - DNA, 24 bp, Artificial Sequence
  Description of Artificial Sequence:  Hypothetical Probe Sequence
gcttcacgcttgaaagcagcgagt

SEQ ID NO: 1494 - DNA, 24 bp, Artificial Sequence
  Description of Artificial Sequence:  Hypothetical Probe Sequence
gcttcacgctgttacaatcggcaa

SEQ ID NO: 1495 - DNA, 24 bp, Artificial Sequence
  Description of Artificial Sequence:  Hypothetical Probe Sequence
gcttcacgtcccgatgcttggacc

SEQ ID NO: 1496 - DNA, 24 bp, Artificial Sequence
  Description of Artificial Sequence:  Hypothetical Probe Sequence
gcttcacggacccacggagtcgaa

SEQ ID NO: 1497 - DNA, 24 bp, Artificial Sequence
  Description of Artificial Sequence:  Hypothetical Probe Sequence
gcttcagcaatctccccgaaagcc

SEQ ID NO: 1498 - DNA, 24 bp, Artificial Sequence
  Description of Artificial Sequence:  Hypothetical Probe Sequence
gcttcagctctgagcctccccacg

SEQ ID NO: 1499 - DNA, 24 bp, Artificial Sequence
  Description of Artificial Sequence:  Hypothetical Probe Sequence
gcttcagctcgtaatctccccagc

SEQ ID NO: 1500 - DNA, 24 bp, Artificial Sequence
  Description of Artificial Sequence:  Hypothetical Probe Sequence
gcttcagcgcaaaaagaatcgacc

SEQ ID NO: 1501 - DNA, 24 bp, Artificial Sequence
  Description of Artificial Sequence:  Hypothetical Probe Sequence
gcttcagcacctggtaagccacgg

SEQ ID NO: 1502 - DNA, 24 bp, Artificial Sequence
  Description of Artificial Sequence:  Hypothetical Probe Sequence
gcttcagccacggcaactcagcaa

SEQ ID NO: 1503 - DNA, 24 bp, Artificial Sequence
  Description of Artificial Sequence:  Hypothetical Probe Sequence
gcttgaccaatccacgtgcgagcc

SEQ ID NO: 1504 - DNA, 24 bp, Artificial Sequence
  Description of Artificial Sequence:  Hypothetical Probe Sequence
gcttgaccccatgcttgcttagcc

SEQ ID NO: 1505 - DNA, 24 bp, Artificial Sequence
  Description of Artificial Sequence:  Hypothetical Probe Sequence
gcttgacccctaagcccacgctca

SEQ ID NO: 1506 - DNA, 24 bp, Artificial Sequence
  Description of Artificial Sequence:  Hypothetical Probe Sequence
gcttgacccagcgaccgtgctctg

SEQ ID NO: 1507 - DNA, 24 bp, Artificial Sequence
  Description of Artificial Sequence:  Hypothetical Probe Sequence
gcttgtgcatcggtgccttgacct

SEQ ID NO: 1508 - DNA, 24 bp, Artificial Sequence
  Description of Artificial Sequence:  Hypothetical Probe Sequence
gcttgtgctcccaatctgcgttga

SEQ ID NO: 1509 - DNA, 24 bp, Artificial Sequence
  Description of Artificial Sequence:  Hypothetical Probe Sequence
gcttggaccgtttctggtgcccat

SEQ ID NO: 1510 - DNA, 24 bp, Artificial Sequence
  Description of Artificial Sequence:  Hypothetical Probe Sequence
gcttggaccgaatctggcaatgtc

SEQ ID NO: 1511 - DNA, 24 bp, Artificial Sequence
  Description of Artificial Sequence:  Hypothetical Probe Sequence
gcttggactccccttgtgtcgcaa

SEQ ID NO: 1512 - DNA, 24 bp, Artificial Sequence
  Description of Artificial Sequence:  Hypothetical Probe Sequence
gcttggaccacgtacatcccagcc

SEQ ID NO: 1513 - DNA, 24 bp, Artificial Sequence
  Description of Artificial Sequence:  Hypothetical Probe Sequence
gcttacggtctgacggtgcgtcgt

SEQ ID NO: 1514 - DNA, 24 bp, Artificial Sequence
  Description of Artificial Sequence:  Hypothetical Probe Sequence
gcttagccctgtaatcacgggcaa

SEQ ID NO: 1515 - DNA, 24 bp, Artificial Sequence
  Description of Artificial Sequence:  Hypothetical Probe Sequence
gcttagccatcgctcaaaagcgaa

SEQ ID NO: 1516 - DNA, 24 bp, Artificial Sequence
  Description of Artificial Sequence:  Hypothetical Probe Sequence
ggtatctggtgcaggacgaatgcg

SEQ ID NO: 1517 - DNA, 24 bp, Artificial Sequence
  Description of Artificial Sequence:  Hypothetical Probe Sequence
ggtatgtcgctttgcgcagctccc

SEQ ID NO: 1518 - DNA, 24 bp, Artificial Sequence
  Description of Artificial Sequence:  Hypothetical Probe Sequence
ggtacgaacagcggtaagccgcaa

SEQ ID NO: 1519 - DNA, 24 bp, Artificial Sequence
  Description of Artificial Sequence:  Hypothetical Probe Sequence
ggtacgaaagcctacaagcccgaa

SEQ ID NO: 1520 - DNA, 24 bp, Artificial Sequence
  Description of Artificial Sequence:  Hypothetical Probe Sequence
ggtagcaacagcgacccagccagc

SEQ ID NO: 1521 - DNA, 24 bp, Artificial Sequence
  Description of Artificial Sequence:  Hypothetical Probe Sequence
ggtagcaaggactgcgtctgtgcg

SEQ ID NO: 1522 - DNA, 24 bp, Artificial Sequence
  Description of Artificial Sequence:  Hypothetical Probe Sequence
ggtaacctcacgtgcgctgttgcg

SEQ ID NO: 1523 - DNA, 24 bp, Artificial Sequence
  Description of Artificial Sequence:  Hypothetical Probe Sequence
ggtaatcggcaacgttcttgacgg

SEQ ID NO: 1524 - DNA, 24 bp, Artificial Sequence
  Description of Artificial Sequence:  Hypothetical Probe Sequence
ggtagatggcttcgtttccccagc

SEQ ID NO: 1525 - DNA, 24 bp, Artificial Sequence
  Description of Artificial Sequence:  Hypothetical Probe Sequence
ggtatgcggcaactgtatcggtgc

SEQ ID NO: 1526 - DNA, 24 bp, Artificial Sequence
  Description of Artificial Sequence:  Hypothetical Probe Sequence
ggtatgcgagtggtgcggtagtgc

SEQ ID NO: 1527 - DNA, 24 bp, Artificial Sequence
  Description of Artificial Sequence:  Hypothetical Probe Sequence
ggtacacggcaacgttccattcgt

SEQ ID NO: 1528 - DNA, 24 bp, Artificial Sequence
  Description of Artificial Sequence:  Hypothetical Probe Sequence
ggtacacgatcggaccaggatgcg

SEQ ID NO: 1529 - DNA, 24 bp, Artificial Sequence
  Description of Artificial Sequence:  Hypothetical Probe Sequence
ggtacacgagccgagtcagcgctt

SEQ ID NO: 1530 - DNA, 24 bp, Artificial Sequence
  Description of Artificial Sequence:  Hypothetical Probe Sequence
ggtacagcgcttaggaggacgtgc

SEQ ID NO: 1531 - DNA, 24 bp, Artificial Sequence
  Description of Artificial Sequence:  Hypothetical Probe Sequence
ggtacagcgaccctgttccctccc

SEQ ID NO: 1532 - DNA, 24 bp, Artificial Sequence
  Description of Artificial Sequence:  Hypothetical Probe Sequence
ggtagaccggtacagcatcgcgaa

SEQ ID NO: 1533 - DNA, 24 bp, Artificial Sequence
  Description of Artificial Sequence:  Hypothetical Probe Sequence
ggtagaccatcgcagcgtgcatcg

SEQ ID NO: 1534 - DNA, 24 bp, Artificial Sequence
  Description of Artificial Sequence:  Hypothetical Probe Sequence
ggtagaccgtgcccatccattgcg

SEQ ID NO: 1535 - DNA, 24 bp, Artificial Sequence
  Description of Artificial Sequence:  Hypothetical Probe Sequence
ggtagaccacggttagtgcgagcc

SEQ ID NO: 1536 - DNA, 24 bp, Artificial Sequence
  Description of Artificial Sequence:  Hypothetical Probe Sequence
ggtaacggtcgtttagacggtgcg

SEQ ID NO: 1537 - DNA, 24 bp, Artificial Sequence
  Description of Artificial Sequence:  Hypothetical Probe Sequence
ggtaacggctgtgtgcgatggatg

SEQ ID NO: 1538 - DNA, 24 bp, Artificial Sequence
  Description of Artificial Sequence:  Hypothetical Probe Sequence
ggtaagccgagtaccttgcgctgt

SEQ ID NO: 1539 - DNA, 24 bp, Artificial Sequence
  Description of Artificial Sequence:  Hypothetical Probe Sequence
gtctttgatgcgcgtttgcgaaag

SEQ ID NO: 1540 - DNA, 24 bp, Artificial Sequence
  Description of Artificial Sequence:  Hypothetical Probe Sequence
gtcttctgcagctgcgcttgccat

SEQ ID NO: 1541 - DNA, 24 bp, Artificial Sequence
  Description of Artificial Sequence:  Hypothetical Probe Sequence
gtctcttgcagcacggtccctgcg

SEQ ID NO: 1542 - DNA, 24 bp, Artificial Sequence
  Description of Artificial Sequence:  Hypothetical Probe Sequence
gtctcgttcgaacagcagccgctt

SEQ ID NO: 1543 - DNA, 24 bp, Artificial Sequence
  Description of Artificial Sequence:  Hypothetical Probe Sequence
gtctcgttgtgccacgtcgttgcg

SEQ ID NO: 1544 - DNA, 24 bp, Artificial Sequence
  Description of Artificial Sequence:  Hypothetical Probe Sequence
gtctccattcccacggctgtagcc

SEQ ID NO: 1545 - DNA, 24 bp, Artificial Sequence
  Description of Artificial Sequence:  Hypothetical Probe Sequence
gtctcgaacgaacagcgcaacacg

SEQ ID NO: 1546 - DNA, 24 bp, Artificial Sequence
  Description of Artificial Sequence:  Hypothetical Probe Sequence
gtctcgaaatcgcgaaacgggacc

SEQ ID NO: 1547 - DNA, 24 bp, Artificial Sequence
  Description of Artificial Sequence:  Hypothetical Probe Sequence
gtctgcaaatcgaatctccccgtt

SEQ ID NO: 1548 - DNA, 24 bp, Artificial Sequence
  Description of Artificial Sequence:  Hypothetical Probe Sequence
gtctgatgcagcatcgtgcggcaa

SEQ ID NO: 1549 - DNA, 24 bp, Artificial Sequence
  Description of Artificial Sequence:  Hypothetical Probe Sequence
gtcttccccttgacggcgttgcaa

SEQ ID NO: 1550 - DNA, 24 bp, Artificial Sequence
  Description of Artificial Sequence:  Hypothetical Probe Sequence
gtcttcccccattctgacggggta

SEQ ID NO: 1551 - DNA, 24 bp, Artificial Sequence
  Description of Artificial Sequence:  Hypothetical Probe Sequence
gtcttcccacggagtgccatgtgc

SEQ ID NO: 1552 - DNA, 24 bp, Artificial Sequence
  Description of Artificial Sequence:  Hypothetical Probe Sequence
gtcttgcgagtgatcgagccagcc

SEQ ID NO: 1553 - DNA, 24 bp, Artificial Sequence
  Description of Artificial Sequence:  Hypothetical Probe Sequence
gtcttgcggacctccctacaacgg

SEQ ID NO: 1554 - DNA, 24 bp, Artificial Sequence
  Description of Artificial Sequence:  Hypothetical Probe Sequence
gtctcacgctcaacggcttgccat

SEQ ID NO: 1555 - DNA, 24 bp, Artificial Sequence
  Description of Artificial Sequence:  Hypothetical Probe Sequence
gtctcacggctttgtcagccgtgc

SEQ ID NO: 1556 - DNA, 24 bp, Artificial Sequence
  Description of Artificial Sequence:  Hypothetical Probe Sequence
gtctcacgcctagacctgcggcaa

SEQ ID NO: 1557 - DNA, 24 bp, Artificial Sequence
  Description of Artificial Sequence:  Hypothetical Probe Sequence
gtctcacgtcccctgtgctttgcg

SEQ ID NO: 1558 - DNA, 24 bp, Artificial Sequence
  Description of Artificial Sequence:  Hypothetical Probe Sequence
gtctcacgacggcgttcgttgtgc

SEQ ID NO: 1559 - DNA, 24 bp, Artificial Sequence
  Description of Artificial Sequence:  Hypothetical Probe Sequence
gtctcagccagctcgttcgtcgaa

SEQ ID NO: 1560 - DNA, 24 bp, Artificial Sequence
  Description of Artificial Sequence:  Hypothetical Probe Sequence
gtctcagcggacggacggacccta

SEQ ID NO: 1561 - DNA, 24 bp, Artificial Sequence
  Description of Artificial Sequence:  Hypothetical Probe Sequence
gtctgtgcgcttcacgttgatgcg

SEQ ID NO: 1562 - DNA, 24 bp, Artificial Sequence
  Description of Artificial Sequence:  Hypothetical Probe Sequence
gtctgtgcgcaaggaccgttccat

SEQ ID NO: 1563 - DNA, 24 bp, Artificial Sequence
  Description of Artificial Sequence:  Hypothetical Probe Sequence
gtctgtgcagccgctttcccagga

SEQ ID NO: 1564 - DNA, 24 bp, Artificial Sequence
  Description of Artificial Sequence:  Hypothetical Probe Sequence
gtctggacgcttacggcgaaaaag

SEQ ID NO: 1565 - DNA, 24 bp, Artificial Sequence
  Description of Artificial Sequence:  Hypothetical Probe Sequence
gtctggactcccgcaacacgtgcg

SEQ ID NO: 1566 - DNA, 24 bp, Artificial Sequence
  Description of Artificial Sequence:  Hypothetical Probe Sequence
gtctggacagccatcgatcgtgcg

SEQ ID NO: 1567 - DNA, 24 bp, Artificial Sequence
  Description of Artificial Sequence:  Hypothetical Probe Sequence
gtctagccggtacagctcccatcg

SEQ ID NO: 1568 - DNA, 24 bp, Artificial Sequence
  Description of Artificial Sequence:  Hypothetical Probe Sequence
gagttctgtgcgcacgcacggcaa

SEQ ID NO: 1569 - DNA, 24 bp, Artificial Sequence
  Description of Artificial Sequence:  Hypothetical Probe Sequence
gagttctgcacgacggcacgtccc

SEQ ID NO: 1570 - DNA, 24 bp, Artificial Sequence
  Description of Artificial Sequence:  Hypothetical Probe Sequence
gagtcttgcacgccatagcccacg

SEQ ID NO: 1571 - DNA, 24 bp, Artificial Sequence
  Description of Artificial Sequence:  Hypothetical Probe Sequence
gagtcgttcgttagccatcgtgcg

SEQ ID NO: 1572 - DNA, 24 bp, Artificial Sequence
  Description of Artificial Sequence:  Hypothetical Probe Sequence
gagtctgtcacgcagcagccagga

SEQ ID NO: 1573 - DNA, 24 bp, Artificial Sequence
  Description of Artificial Sequence:  Hypothetical Probe Sequence
gagtcgaaagcctgcgtcgtccat

SEQ ID NO: 1574 - DNA, 24 bp, Artificial Sequence
  Description of Artificial Sequence:  Hypothetical Probe Sequence
gagtgcttgcaacacgcacgacct

SEQ ID NO: 1575 - DNA, 24 bp, Artificial Sequence
  Description of Artificial Sequence:  Hypothetical Probe Sequence
gagtgcttcacggtgcgtgcagcc

SEQ ID NO: 1576 - DNA, 24 bp, Artificial Sequence
  Description of Artificial Sequence:  Hypothetical Probe Sequence
gagtatcgtgcgatcggaccctca

SEQ ID NO: 1577 - DNA, 24 bp, Artificial Sequence
  Description of Artificial Sequence:  Hypothetical Probe Sequence
gagtcctacagctcccgctttgcg

SEQ ID NO: 1578 - DNA, 24 bp, Artificial Sequence
  Description of Artificial Sequence:  Hypothetical Probe Sequence
gagttcccgtgccctatcgtgtgc

SEQ ID NO: 1579 - DNA, 24 bp, Artificial Sequence
  Description of Artificial Sequence:  Hypothetical Probe Sequence
gagttgcgaaagcacgggacgtgc

SEQ ID NO: 1580 - DNA, 24 bp, Artificial Sequence
  Description of Artificial Sequence:  Hypothetical Probe Sequence
gagttgcgccattacatcccggta

SEQ ID NO: 1581 - DNA, 24 bp, Artificial Sequence
  Description of Artificial Sequence:  Hypothetical Probe Sequence
gagttgcgggtagcaatctgcacg

SEQ ID NO: 1582 - DNA, 24 bp, Artificial Sequence
  Description of Artificial Sequence:  Hypothetical Probe Sequence
gagttgcgacctagcctccctgcg

SEQ ID NO: 1583 - DNA, 24 bp, Artificial Sequence
  Description of Artificial Sequence:  Hypothetical Probe Sequence
gagtcagcgatggtgcggacacgg

SEQ ID NO: 1584 - DNA, 24 bp, Artificial Sequence
  Description of Artificial Sequence:  Hypothetical Probe Sequence
gagtcagctccctctggacccgtt

SEQ ID NO: 1585 - DNA, 24 bp, Artificial Sequence
  Description of Artificial Sequence:  Hypothetical Probe Sequence
gagtcagcggacagccgagtcacg

SEQ ID NO: 1586 - DNA, 24 bp, Artificial Sequence
  Description of Artificial Sequence:  Hypothetical Probe Sequence
gagtgacccgtttccccgaactgt

SEQ ID NO: 1587 - DNA, 24 bp, Artificial Sequence
  Description of Artificial Sequence:  Hypothetical Probe Sequence
gagtgaccgtgcgaccagcccttg

SEQ ID NO: 1588 - DNA, 24 bp, Artificial Sequence
  Description of Artificial Sequence:  Hypothetical Probe Sequence
gagtgtgcttgaggactcccgtgc

SEQ ID NO: 1589 - DNA, 24 bp, Artificial Sequence
  Description of Artificial Sequence:  Hypothetical Probe Sequence
gagtggacccattgtcggacggac

SEQ ID NO: 1590 - DNA, 24 bp, Artificial Sequence
  Description of Artificial Sequence:  Hypothetical Probe Sequence
gagtggacggactgtcatcgcacg

SEQ ID NO: 1591 - DNA, 24 bp, Artificial Sequence
  Description of Artificial Sequence:  Hypothetical Probe Sequence
gagtacggccatttagtgcggctt

SEQ ID NO: 1592 - DNA, 24 bp, Artificial Sequence
  Description of Artificial Sequence:  Hypothetical Probe Sequence
gagtagccatcggaccagcccacg

SEQ ID NO: 1593 - DNA, 24 bp, Artificial Sequence
  Description of Artificial Sequence:  Hypothetical Probe Sequence
gcaattgagtgcggaccgaacagc

SEQ ID NO: 1594 - DNA, 24 bp, Artificial Sequence
  Description of Artificial Sequence:  Hypothetical Probe Sequence
gcaatgattcgttccccttgcacg

SEQ ID NO: 1595 - DNA, 24 bp, Artificial Sequence
  Description of Artificial Sequence:  Hypothetical Probe Sequence
gcaatgatcagcgctttcccagcc

SEQ ID NO: 1596 - DNA, 24 bp, Artificial Sequence
  Description of Artificial Sequence:  Hypothetical Probe Sequence
gcaaaatcatcggtgccgaaacct

SEQ ID NO: 1597 - DNA, 24 bp, Artificial Sequence
  Description of Artificial Sequence:  Hypothetical Probe Sequence
gcaaaatctcccatcgctcatccc

SEQ ID NO: 1598 - DNA, 24 bp, Artificial Sequence
  Description of Artificial Sequence:  Hypothetical Probe Sequence
gcaaaatccacgcagcctgtgacc

SEQ ID NO: 1599 - DNA, 24 bp, Artificial Sequence
  Description of Artificial Sequence:  Hypothetical Probe Sequence
gcaaaaagacctaggaagccgcaa

SEQ ID NO: 1600 - DNA, 24 bp, Artificial Sequence
  Description of Artificial Sequence:  Hypothetical Probe Sequence
gcaatctgcgttttagggacacgg

SEQ ID NO: 1601 - DNA, 24 bp, Artificial Sequence
  Description of Artificial Sequence:  Hypothetical Probe Sequence
gcaatctggcaacgttatcgcgtt

SEQ ID NO: 1602 - DNA, 24 bp, Artificial Sequence
  Description of Artificial Sequence:  Hypothetical Probe Sequence
gcaatctgtcccgcaactcaagcc

SEQ ID NO: 1603 - DNA, 24 bp, Artificial Sequence
  Description of Artificial Sequence:  Hypothetical Probe Sequence
gcaatctgtgcgctgtggacgtgc

SEQ ID NO: 1604 - DNA, 24 bp, Artificial Sequence
  Description of Artificial Sequence:  Hypothetical Probe Sequence
gcaatctggaccaatcagccccat

SEQ ID NO: 1605 - DNA, 24 bp, Artificial Sequence
  Description of Artificial Sequence:  Hypothetical Probe Sequence
gcaatctgggacagccgtgccagc

SEQ ID NO: 1606 - DNA, 24 bp, Artificial Sequence
  Description of Artificial Sequence:  Hypothetical Probe Sequence
gcaatgtctcgtgacctgcgcgaa

SEQ ID NO: 1607 - DNA, 24 bp, Artificial Sequence
  Description of Artificial Sequence:  Hypothetical Probe Sequence
gcaatgtcgctttcgtgtgcctca

SEQ ID NO: 1608 - DNA, 24 bp, Artificial Sequence
  Description of Artificial Sequence:  Hypothetical Probe Sequence
gcaatgtcggtagacctcccgctt

SEQ ID NO: 1609 - DNA, 24 bp, Artificial Sequence
  Description of Artificial Sequence:  Hypothetical Probe Sequence
gcaatgtcatcgtccctccccacg

SEQ ID NO: 1610 - DNA, 24 bp, Artificial Sequence
  Description of Artificial Sequence:  Hypothetical Probe Sequence
gcaatgtctgcggatgcgaaggac

SEQ ID NO: 1611 - DNA, 24 bp, Artificial Sequence
  Description of Artificial Sequence:  Hypothetical Probe Sequence
gcaatgtccacgcgaaatcgtcgt

SEQ ID NO: 1612 - DNA, 24 bp, Artificial Sequence
  Description of Artificial Sequence:  Hypothetical Probe Sequence
gcaatcgtctgttgcgaatccgaa

SEQ ID NO: 1613 - DNA, 24 bp, Artificial Sequence
  Description of Artificial Sequence:  Hypothetical Probe Sequence
gcaatcgtacctgcttgtgccgaa

SEQ ID NO: 1614 - DNA, 24 bp, Artificial Sequence
  Description of Artificial Sequence:  Hypothetical Probe Sequence
gcaatcgtagcctgattccccagc

SEQ ID NO: 1615 - DNA, 24 bp, Artificial Sequence
  Description of Artificial Sequence:  Hypothetical Probe Sequence
gcaacttggatgagcccacgcgaa

SEQ ID NO: 1616 - DNA, 24 bp, Artificial Sequence
  Description of Artificial Sequence:  Hypothetical Probe Sequence
gcaacttgcagccgaagcaagtgc

SEQ ID NO: 1617 - DNA, 24 bp, Artificial Sequence
  Description of Artificial Sequence:  Hypothetical Probe Sequence
gcaacgttttgatcgtcacgagcc

SEQ ID NO: 1618 - DNA, 24 bp, Artificial Sequence
  Description of Artificial Sequence:  Hypothetical Probe Sequence
gcaacgtttacaacggcagcgcaa

SEQ ID NO: 1619 - DNA, 24 bp, Artificial Sequence
  Description of Artificial Sequence:  Hypothetical Probe Sequence
gcaacgttgatggtgctccctgcg

SEQ ID NO: 1620 - DNA, 24 bp, Artificial Sequence
  Description of Artificial Sequence:  Hypothetical Probe Sequence
gcaacgtttcccacctttgaagcc

SEQ ID NO: 1621 - DNA, 24 bp, Artificial Sequence
  Description of Artificial Sequence:  Hypothetical Probe Sequence
gcaactcaatcgcgaagtgcccat

SEQ ID NO: 1622 - DNA, 24 bp, Artificial Sequence
  Description of Artificial Sequence:  Hypothetical Probe Sequence
gcaactcacacgacgggtgcagga

SEQ ID NO: 1623 - DNA, 24 bp, Artificial Sequence
  Description of Artificial Sequence:  Hypothetical Probe Sequence
gcaactcaacgggcttggacagga

SEQ ID NO: 1624 - DNA, 24 bp, Artificial Sequence
  Description of Artificial Sequence:  Hypothetical Probe Sequence
gcaactgttgcggcaagcaaacct

SEQ ID NO: 1625 - DNA, 24 bp, Artificial Sequence
  Description of Artificial Sequence:  Hypothetical Probe Sequence
gcaaccatctcaggaccagcgcaa

SEQ ID NO: 1626 - DNA, 24 bp, Artificial Sequence
  Description of Artificial Sequence:  Hypothetical Probe Sequence
gcaaccatcgaatgtcacggatcg

SEQ ID NO: 1627 - DNA, 24 bp, Artificial Sequence
  Description of Artificial Sequence:  Hypothetical Probe Sequence
gcaaccatgatgacggtcccagga

SEQ ID NO: 1628 - DNA, 24 bp, Artificial Sequence
  Description of Artificial Sequence:  Hypothetical Probe Sequence
gcaaccattgcgtcccttagtcgt

SEQ ID NO: 1629 - DNA, 24 bp, Artificial Sequence
  Description of Artificial Sequence:  Hypothetical Probe Sequence
gcaaccatggacgatgcgaagtgc

SEQ ID NO: 1630 - DNA, 24 bp, Artificial Sequence
  Description of Artificial Sequence:  Hypothetical Probe Sequence
gcaacgaagcttgacctgtcgctt

SEQ ID NO: 1631 - DNA, 24 bp, Artificial Sequence
  Description of Artificial Sequence:  Hypothetical Probe Sequence
gcaagcttgctttgtccttggcaa

SEQ ID NO: 1632 - DNA, 24 bp, Artificial Sequence
  Description of Artificial Sequence:  Hypothetical Probe Sequence
gcaagcttcacggcttcagcctgt

SEQ ID NO: 1633 - DNA, 24 bp, Artificial Sequence
  Description of Artificial Sequence:  Hypothetical Probe Sequence
gcaagcttagccgatggtgcctca

SEQ ID NO: 1634 - DNA, 24 bp, Artificial Sequence
  Description of Artificial Sequence:  Hypothetical Probe Sequence
gcaagtctgcttaatcgaccgcaa

SEQ ID NO: 1635 - DNA, 24 bp, Artificial Sequence
  Description of Artificial Sequence:  Hypothetical Probe Sequence
gcaagcaaaatcgcaatcgttccc

SEQ ID NO: 1636 - DNA, 24 bp, Artificial Sequence
  Description of Artificial Sequence:  Hypothetical Probe Sequence
gcaagcaacttgctcatgcgagcc

SEQ ID NO: 1637 - DNA, 24 bp, Artificial Sequence
  Description of Artificial Sequence:  Hypothetical Probe Sequence
gcaagcaactcagacccacgtcgt

SEQ ID NO: 1638 - DNA, 24 bp, Artificial Sequence
  Description of Artificial Sequence:  Hypothetical Probe Sequence
gcaagcaagctttcccgatgaatc

SEQ ID NO: 1639 - DNA, 24 bp, Artificial Sequence
  Description of Artificial Sequence:  Hypothetical Probe Sequence
gcaagcaacagcatacgaccgcaa

SEQ ID NO: 1640 - DNA, 24 bp, Artificial Sequence
  Description of Artificial Sequence:  Hypothetical Probe Sequence
gcaaagtgggtaccattgcgctca

SEQ ID NO: 1641 - DNA, 24 bp, Artificial Sequence
  Description of Artificial Sequence:  Hypothetical Probe Sequence
gcaaaccttctgagcccttgcacg

SEQ ID NO: 1642 - DNA, 24 bp, Artificial Sequence
  Description of Artificial Sequence:  Hypothetical Probe Sequence
gcaaaccttgtccagctcccggac

SEQ ID NO: 1643 - DNA, 24 bp, Artificial Sequence
  Description of Artificial Sequence:  Hypothetical Probe Sequence
gcaaacctccattgcgggacaatc

SEQ ID NO: 1644 - DNA, 24 bp, Artificial Sequence
  Description of Artificial Sequence:  Hypothetical Probe Sequence
gcaaacctgcaagaccctcagcaa

SEQ ID NO: 1645 - DNA, 24 bp, Artificial Sequence
  Description of Artificial Sequence:  Hypothetical Probe Sequence
gcaaacctgaccgcaaagccggta

SEQ ID NO: 1646 - DNA, 24 bp, Artificial Sequence
  Description of Artificial Sequence:  Hypothetical Probe Sequence
gcaaacctggacgcaagaccgacc

SEQ ID NO: 1647 - DNA, 24 bp, Artificial Sequence
  Description of Artificial Sequence:  Hypothetical Probe Sequence
gcaaatcgctcacctaagccgtct

SEQ ID NO: 1648 - DNA, 24 bp, Artificial Sequence
  Description of Artificial Sequence:  Hypothetical Probe Sequence
gcaaatcggagttgtccagcagcc

SEQ ID NO: 1649 - DNA, 24 bp, Artificial Sequence
  Description of Artificial Sequence:  Hypothetical Probe Sequence
gcaaatcgtccccagctgtcccat

SEQ ID NO: 1650 - DNA, 24 bp, Artificial Sequence
  Description of Artificial Sequence:  Hypothetical Probe Sequence
gcaaatcggaccatacgtgcagga

SEQ ID NO: 1651 - DNA, 24 bp, Artificial Sequence
  Description of Artificial Sequence:  Hypothetical Probe Sequence
gcaaaggatctgtgcggcaaatcg

SEQ ID NO: 1652 - DNA, 24 bp, Artificial Sequence
  Description of Artificial Sequence:  Hypothetical Probe Sequence
gcaaaggacttgggacacggtgcg

SEQ ID NO: 1653 - DNA, 24 bp, Artificial Sequence
  Description of Artificial Sequence:  Hypothetical Probe Sequence
gcaaaggactcagtgcagccgcaa

SEQ ID NO: 1654 - DNA, 24 bp, Artificial Sequence
  Description of Artificial Sequence:  Hypothetical Probe Sequence
gcaaaggaacctatcggatgcgtt

SEQ ID NO: 1655 - DNA, 24 bp, Artificial Sequence
  Description of Artificial Sequence:  Hypothetical Probe Sequence
gcaaaggaatcgcacgggtacgaa

SEQ ID NO: 1656 - DNA, 24 bp, Artificial Sequence
  Description of Artificial Sequence:  Hypothetical Probe Sequence
gcaacctagaccgctttcccacgg

SEQ ID NO: 1657 - DNA, 24 bp, Artificial Sequence
  Description of Artificial Sequence:  Hypothetical Probe Sequence
gcaacctaagccaggatcgttccc

SEQ ID NO: 1658 - DNA, 24 bp, Artificial Sequence
  Description of Artificial Sequence:  Hypothetical Probe Sequence
gcaagatgcgttagtgggacagcc

SEQ ID NO: 1659 - DNA, 24 bp, Artificial Sequence
  Description of Artificial Sequence:  Hypothetical Probe Sequence
gcaagatgcctacacgcgaaagcc

SEQ ID NO: 1660 - DNA, 24 bp, Artificial Sequence
  Description of Artificial Sequence:  Hypothetical Probe Sequence
gcaagatgtgcgttgagacccagc

SEQ ID NO: 1661 - DNA, 24 bp, Artificial Sequence
  Description of Artificial Sequence:  Hypothetical Probe Sequence
gcaatcccaatcacggcgaataca

SEQ ID NO: 1662 - DNA, 24 bp, Artificial Sequence
  Description of Artificial Sequence:  Hypothetical Probe Sequence
gcaatccctctgcagcgagtgctt

SEQ ID NO: 1663 - DNA, 24 bp, Artificial Sequence
  Description of Artificial Sequence:  Hypothetical Probe Sequence
gcaatcccacggggacaatcgtgc

SEQ ID NO: 1664 - DNA, 24 bp, Artificial Sequence
  Description of Artificial Sequence:  Hypothetical Probe Sequence
gcaatgcgttaggatgccattgcg

SEQ ID NO: 1665 - DNA, 24 bp, Artificial Sequence
  Description of Artificial Sequence:  Hypothetical Probe Sequence
gcaatgcgaaaggatgcgttcgaa

SEQ ID NO: 1666 - DNA, 24 bp, Artificial Sequence
  Description of Artificial Sequence:  Hypothetical Probe Sequence
gcaatgcgtcgtcgaatcgtctca

SEQ ID NO: 1667 - DNA, 24 bp, Artificial Sequence
  Description of Artificial Sequence:  Hypothetical Probe Sequence
gcaatgcgcgttgtgcctgtggta

SEQ ID NO: 1668 - DNA, 24 bp, Artificial Sequence
  Description of Artificial Sequence:  Hypothetical Probe Sequence
gcaatgcgctcaacctcgttgtgc

SEQ ID NO: 1669 - DNA, 24 bp, Artificial Sequence
  Description of Artificial Sequence:  Hypothetical Probe Sequence
gcaatgcgcgaatctggatgatcg

SEQ ID NO: 1670 - DNA, 24 bp, Artificial Sequence
  Description of Artificial Sequence:  Hypothetical Probe Sequence
gcaatgcgcagcgctttctgatcg

SEQ ID NO: 1671 - DNA, 24 bp, Artificial Sequence
  Description of Artificial Sequence:  Hypothetical Probe Sequence
gcaatgcgggacttagaccttccc

SEQ ID NO: 1672 - DNA, 24 bp, Artificial Sequence
  Description of Artificial Sequence:  Hypothetical Probe Sequence
gcaacacgaatcgatgcagcggac

SEQ ID NO: 1673 - DNA, 24 bp, Artificial Sequence
  Description of Artificial Sequence:  Hypothetical Probe Sequence
gcaacacgtctgcctatgcgccat

SEQ ID NO: 1674 - DNA, 24 bp, Artificial Sequence
  Description of Artificial Sequence:  Hypothetical Probe Sequence
gcaacacgcgttctgtggtaacgg

SEQ ID NO: 1675 - DNA, 24 bp, Artificial Sequence
  Description of Artificial Sequence:  Hypothetical Probe Sequence
gcaacacgctcagcaaaaagcgtt

SEQ ID NO: 1676 - DNA, 24 bp, Artificial Sequence
  Description of Artificial Sequence:  Hypothetical Probe Sequence
gcaacacgtcccgtcttcccctgt

SEQ ID NO: 1677 - DNA, 24 bp, Artificial Sequence
  Description of Artificial Sequence:  Hypothetical Probe Sequence
gcaacacgggaccacgatcggagt

SEQ ID NO: 1678 - DNA, 24 bp, Artificial Sequence
  Description of Artificial Sequence:  Hypothetical Probe Sequence
gcaacagcttgatgcgccatcacg

SEQ ID NO: 1679 - DNA, 24 bp, Artificial Sequence
  Description of Artificial Sequence:  Hypothetical Probe Sequence
gcaacagctcgtaggaatcggctt

SEQ ID NO: 1680 - DNA, 24 bp, Artificial Sequence
  Description of Artificial Sequence:  Hypothetical Probe Sequence
gcaacagcccatagtgatcgcacg

SEQ ID NO: 1681 - DNA, 24 bp, Artificial Sequence
  Description of Artificial Sequence:  Hypothetical Probe Sequence
gcaacagcggtaaaaggcttcagc

SEQ ID NO: 1682 - DNA, 24 bp, Artificial Sequence
  Description of Artificial Sequence:  Hypothetical Probe Sequence
gcaacagcgagtaggagtgccacg

SEQ ID NO: 1683 - DNA, 24 bp, Artificial Sequence
  Description of Artificial Sequence:  Hypothetical Probe Sequence
gcaacagccctaatacagcccgtt

SEQ ID NO: 1684 - DNA, 24 bp, Artificial Sequence
  Description of Artificial Sequence:  Hypothetical Probe Sequence
gcaacagccacgcttgcagctctg

SEQ ID NO: 1685 - DNA, 24 bp, Artificial Sequence
  Description of Artificial Sequence:  Hypothetical Probe Sequence
gcaagaccccattcgtcgtttcgt

SEQ ID NO: 1686 - DNA, 24 bp, Artificial Sequence
  Description of Artificial Sequence:  Hypothetical Probe Sequence
gcaagaccacctaatcggacacgg

SEQ ID NO: 1687 - DNA, 24 bp, Artificial Sequence
  Description of Artificial Sequence:  Hypothetical Probe Sequence
gcaagaccggacggaccacgaaag

SEQ ID NO: 1688 - DNA, 24 bp, Artificial Sequence
  Description of Artificial Sequence:  Hypothetical Probe Sequence
gcaagtgccttgaatctgcgggac

SEQ ID NO: 1689 - DNA, 24 bp, Artificial Sequence
  Description of Artificial Sequence:  Hypothetical Probe Sequence
gcaagtgcctgtctgttcccacgg

SEQ ID NO: 1690 - DNA, 24 bp, Artificial Sequence
  Description of Artificial Sequence:  Hypothetical Probe Sequence
gcaagtgcggtatcccgagtgatg

SEQ ID NO: 1691 - DNA, 24 bp, Artificial Sequence
  Description of Artificial Sequence:  Hypothetical Probe Sequence
gcaagtgcgcaattagatcgtgcg

SEQ ID NO: 1692 - DNA, 24 bp, Artificial Sequence
  Description of Artificial Sequence:  Hypothetical Probe Sequence
gcaagtgcacctgacctccccacg

SEQ ID NO: 1693 - DNA, 24 bp, Artificial Sequence
  Description of Artificial Sequence:  Hypothetical Probe Sequence
gcaagtgcatcgcctagtgctccc

SEQ ID NO: 1694 - DNA, 24 bp, Artificial Sequence
  Description of Artificial Sequence:  Hypothetical Probe Sequence
gcaagtgccctagtgcgtgcagtg

SEQ ID NO: 1695 - DNA, 24 bp, Artificial Sequence
  Description of Artificial Sequence:  Hypothetical Probe Sequence
gcaagtgctcccgtctgtgcccat

SEQ ID NO: 1696 - DNA, 24 bp, Artificial Sequence
  Description of Artificial Sequence:  Hypothetical Probe Sequence
gcaagtgcgtgcaaaggcttttga

SEQ ID NO: 1697 - DNA, 24 bp, Artificial Sequence
  Description of Artificial Sequence:  Hypothetical Probe Sequence
gcaagtgcacggaccttcgtccat

SEQ ID NO: 1698 - DNA, 24 bp, Artificial Sequence
  Description of Artificial Sequence:  Hypothetical Probe Sequence
gcaaggacaatccgaatgcggcaa

SEQ ID NO: 1699 - DNA, 24 bp, Artificial Sequence
  Description of Artificial Sequence:  Hypothetical Probe Sequence
gcaaggactcgtggacgtgcgtgc

SEQ ID NO: 1700 - DNA, 24 bp, Artificial Sequence
  Description of Artificial Sequence:  Hypothetical Probe Sequence
gcaaggacctgttctggcaaacgg

SEQ ID NO: 1701 - DNA, 24 bp, Artificial Sequence
  Description of Artificial Sequence:  Hypothetical Probe Sequence
gcaaggacatcgccattccctgtc

SEQ ID NO: 1702 - DNA, 24 bp, Artificial Sequence
  Description of Artificial Sequence:  Hypothetical Probe Sequence
gcaaggaccagcttagggactgcg

SEQ ID NO: 1703 - DNA, 24 bp, Artificial Sequence
  Description of Artificial Sequence:  Hypothetical Probe Sequence
gcaaggacggacaggagcttgacc

SEQ ID NO: 1704 - DNA, 24 bp, Artificial Sequence
  Description of Artificial Sequence:  Hypothetical Probe Sequence
gcaaacggctgtcacgtgatcgaa

SEQ ID NO: 1705 - DNA, 24 bp, Artificial Sequence
  Description of Artificial Sequence:  Hypothetical Probe Sequence
gcaaacgggcttgtgccctaagtg

SEQ ID NO: 1706 - DNA, 24 bp, Artificial Sequence
  Description of Artificial Sequence:  Hypothetical Probe Sequence
gcaaacgggtctgagtcacgcacg

SEQ ID NO: 1707 - DNA, 24 bp, Artificial Sequence
  Description of Artificial Sequence:  Hypothetical Probe Sequence
gcaaacggagtgctcacagccgtt

SEQ ID NO: 1708 - DNA, 24 bp, Artificial Sequence
  Description of Artificial Sequence:  Hypothetical Probe Sequence
gcaaacggtgcgcgaagtctgtgc

SEQ ID NO: 1709 - DNA, 24 bp, Artificial Sequence
  Description of Artificial Sequence:  Hypothetical Probe Sequence
gcaaacggggacgatgtctgcgaa

SEQ ID NO: 1710 - DNA, 24 bp, Artificial Sequence
  Description of Artificial Sequence:  Hypothetical Probe Sequence
gcaaagccgtctgtctgcaagcaa

SEQ ID NO: 1711 - DNA, 24 bp, Artificial Sequence
  Description of Artificial Sequence:  Hypothetical Probe Sequence
gcaaagccacctccatcgaaccta

SEQ ID NO: 1712 - DNA, 24 bp, Artificial Sequence
  Description of Artificial Sequence:  Hypothetical Probe Sequence
gcaaagccaggaacctaaaggcaa

SEQ ID NO: 1713 - DNA, 24 bp, Artificial Sequence
  Description of Artificial Sequence:  Hypothetical Probe Sequence
gcaaagcccctagtgccgaagtct

SEQ ID NO: 1714 - DNA, 24 bp, Artificial Sequence
  Description of Artificial Sequence:  Hypothetical Probe Sequence
gcaaagcctcccctgtggtaagcc

SEQ ID NO: 1715 - DNA, 24 bp, Artificial Sequence
  Description of Artificial Sequence:  Hypothetical Probe Sequence
agtgaatccgaaaggagtgctgcg

SEQ ID NO: 1716 - DNA, 24 bp, Artificial Sequence
  Description of Artificial Sequence:  Hypothetical Probe Sequence
agtgaatcacggcagcagccacgg

SEQ ID NO: 1717 - DNA, 24 bp, Artificial Sequence
  Description of Artificial Sequence:  Hypothetical Probe Sequence
agtgtctgcacgcagccacggacc

SEQ ID NO: 1718 - DNA, 24 bp, Artificial Sequence
  Description of Artificial Sequence:  Hypothetical Probe Sequence
agtgtcgtacggaccttgcgtgcg

SEQ ID NO: 1719 - DNA, 24 bp, Artificial Sequence
  Description of Artificial Sequence:  Hypothetical Probe Sequence
agtgcttgccatagccagccctgt

SEQ ID NO: 1720 - DNA, 24 bp, Artificial Sequence
  Description of Artificial Sequence:  Hypothetical Probe Sequence
agtgcttgggtaggacgtgcgatg

SEQ ID NO: 1721 - DNA, 24 bp, Artificial Sequence
  Description of Artificial Sequence:  Hypothetical Probe Sequence
agtgcttgcctaccatagcccgaa

SEQ ID NO: 1722 - DNA, 24 bp, Artificial Sequence
  Description of Artificial Sequence:  Hypothetical Probe Sequence
agtgcttgggactgcgggtagacc

SEQ ID NO: 1723 - DNA, 24 bp, Artificial Sequence
  Description of Artificial Sequence:  Hypothetical Probe Sequence
agtgcgtttcgtagtgggactgcg

SEQ ID NO: 1724 - DNA, 24 bp, Artificial Sequence
  Description of Artificial Sequence:  Hypothetical Probe Sequence
agtgcgttgtctgatgcgtttgcg

SEQ ID NO: 1725 - DNA, 24 bp, Artificial Sequence
  Description of Artificial Sequence:  Hypothetical Probe Sequence
agtgctcatccccgaaggacgacc

SEQ ID NO: 1726 - DNA, 24 bp, Artificial Sequence
  Description of Artificial Sequence:  Hypothetical Probe Sequence
agtgctgttcccatcggtgccagc

SEQ ID NO: 1727 - DNA, 24 bp, Artificial Sequence
  Description of Artificial Sequence:  Hypothetical Probe Sequence
agtgccatcttgacggctcaacgg

SEQ ID NO: 1728 - DNA, 24 bp, Artificial Sequence
  Description of Artificial Sequence:  Hypothetical Probe Sequence
agtgcgaatgcgaaagttgaagcc

SEQ ID NO: 1729 - DNA, 24 bp, Artificial Sequence
  Description of Artificial Sequence:  Hypothetical Probe Sequence
agtggcttcgttcttgcacgtccc

SEQ ID NO: 1730 - DNA, 24 bp, Artificial Sequence
  Description of Artificial Sequence:  Hypothetical Probe Sequence
agtggctttcccggaccctacacg

SEQ ID NO: 1731 - DNA, 24 bp, Artificial Sequence
  Description of Artificial Sequence:  Hypothetical Probe Sequence
agtggctttgcgcctagatggctt

SEQ ID NO: 1732 - DNA, 24 bp, Artificial Sequence
  Description of Artificial Sequence:  Hypothetical Probe Sequence
agtggcttgaccctgtacggcagc

SEQ ID NO: 1733 - DNA, 24 bp, Artificial Sequence
  Description of Artificial Sequence:  Hypothetical Probe Sequence
agtggcttagcctcgtgacccacg

SEQ ID NO: 1734 - DNA, 24 bp, Artificial Sequence
  Description of Artificial Sequence:  Hypothetical Probe Sequence
agtgggtacgttacgggtgcccat

SEQ ID NO: 1735 - DNA, 24 bp, Artificial Sequence
  Description of Artificial Sequence:  Hypothetical Probe Sequence
agtgggtatgcggcttgaccctca

SEQ ID NO: 1736 - DNA, 24 bp, Artificial Sequence
  Description of Artificial Sequence:  Hypothetical Probe Sequence
agtggcaaaaagtctgctgttgcg

SEQ ID NO: 1737 - DNA, 24 bp, Artificial Sequence
  Description of Artificial Sequence:  Hypothetical Probe Sequence
agtggcaaagtgagcctgcgcagc

SEQ ID NO: 1738 - DNA, 24 bp, Artificial Sequence
  Description of Artificial Sequence:  Hypothetical Probe Sequence
agtggcaagacctcgtgtgcgtgc

SEQ ID NO: 1739 - DNA, 24 bp, Artificial Sequence
  Description of Artificial Sequence:  Hypothetical Probe Sequence
agtgatcgctcaacggagccggta

SEQ ID NO: 1740 - DNA, 24 bp, Artificial Sequence
  Description of Artificial Sequence:  Hypothetical Probe Sequence
agtgatcgtgcgaccttgtcacgg

SEQ ID NO: 1741 - DNA, 24 bp, Artificial Sequence
  Description of Artificial Sequence:  Hypothetical Probe Sequence
agtgatcgcagcaccttgcggagt

SEQ ID NO: 1742 - DNA, 24 bp, Artificial Sequence
  Description of Artificial Sequence:  Hypothetical Probe Sequence
agtgatcggtgcatcggcttgcaa

SEQ ID NO: 1743 - DNA, 24 bp, Artificial Sequence
  Description of Artificial Sequence:  Hypothetical Probe Sequence
agtgatcgacggggtatcccacgg

SEQ ID NO: 1744 - DNA, 24 bp, Artificial Sequence
  Description of Artificial Sequence:  Hypothetical Probe Sequence
agtgcctatccccttggcttcgtt

SEQ ID NO: 1745 - DNA, 24 bp, Artificial Sequence
  Description of Artificial Sequence:  Hypothetical Probe Sequence
agtgcctacagcgcaatgcgcacg

SEQ ID NO: 1746 - DNA, 24 bp, Artificial Sequence
  Description of Artificial Sequence:  Hypothetical Probe Sequence
agtgcctagtgcgcttacgggcaa

SEQ ID NO: 1747 - DNA, 24 bp, Artificial Sequence
  Description of Artificial Sequence:  Hypothetical Probe Sequence
agtggatgagccggacacggccta

SEQ ID NO: 1748 - DNA, 24 bp, Artificial Sequence
  Description of Artificial Sequence:  Hypothetical Probe Sequence
agtgtccctcgtagccagccagga

SEQ ID NO: 1749 - DNA, 24 bp, Artificial Sequence
  Description of Artificial Sequence:  Hypothetical Probe Sequence
agtgtcccctgttcccgatgcagc

SEQ ID NO: 1750 - DNA, 24 bp, Artificial Sequence
  Description of Artificial Sequence:  Hypothetical Probe Sequence
agtgtcccgtgcataccgaaatcg

SEQ ID NO: 1751 - DNA, 24 bp, Artificial Sequence
  Description of Artificial Sequence:  Hypothetical Probe Sequence
agtgtgcgaatctgcgcagcagga

SEQ ID NO: 1752 - DNA, 24 bp, Artificial Sequence
  Description of Artificial Sequence:  Hypothetical Probe Sequence
agtgtgcgcttggtctgaccacgg

SEQ ID NO: 1753 - DNA, 24 bp, Artificial Sequence
  Description of Artificial Sequence:  Hypothetical Probe Sequence
agtgtgcgcgaactgtgatgccat

SEQ ID NO: 1754 - DNA, 24 bp, Artificial Sequence
  Description of Artificial Sequence:  Hypothetical Probe Sequence
agtgtgcgcctagagtagccgctt

SEQ ID NO: 1755 - DNA, 24 bp, Artificial Sequence
  Description of Artificial Sequence:  Hypothetical Probe Sequence
agtgtgcgtgcgtacacacgccat

SEQ ID NO: 1756 - DNA, 24 bp, Artificial Sequence
  Description of Artificial Sequence:  Hypothetical Probe Sequence
agtgcacgcgttaaagagccacct

SEQ ID NO: 1757 - DNA, 24 bp, Artificial Sequence
  Description of Artificial Sequence:  Hypothetical Probe Sequence
agtgcacgcgaatacacagcacgg

SEQ ID NO: 1758 - DNA, 24 bp, Artificial Sequence
  Description of Artificial Sequence:  Hypothetical Probe Sequence
agtgcacgtgcgcgtttacaagcc

SEQ ID NO: 1759 - DNA, 24 bp, Artificial Sequence
  Description of Artificial Sequence:  Hypothetical Probe Sequence
agtgcacggaccttagagccccat

SEQ ID NO: 1760 - DNA, 24 bp, Artificial Sequence
  Description of Artificial Sequence:  Hypothetical Probe Sequence
agtgcagcgcttcctaaaaggtgc

SEQ ID NO: 1761 - DNA, 24 bp, Artificial Sequence
  Description of Artificial Sequence:  Hypothetical Probe Sequence
agtggaccgcaacctagtgcatcg

SEQ ID NO: 1762 - DNA, 24 bp, Artificial Sequence
  Description of Artificial Sequence:  Hypothetical Probe Sequence
agtggaccggactctgtcccgacc

SEQ ID NO: 1763 - DNA, 24 bp, Artificial Sequence
  Description of Artificial Sequence:  Hypothetical Probe Sequence
agtggtgcaatcctcagtgctccc

SEQ ID NO: 1764 - DNA, 24 bp, Artificial Sequence
  Description of Artificial Sequence:  Hypothetical Probe Sequence
agtggtgcccatcgaagcttggac

SEQ ID NO: 1765 - DNA, 24 bp, Artificial Sequence
  Description of Artificial Sequence:  Hypothetical Probe Sequence
agtggtgcgtctatactgcgcagc

SEQ ID NO: 1766 - DNA, 24 bp, Artificial Sequence
  Description of Artificial Sequence:  Hypothetical Probe Sequence
agtggtgcgagtcctatgcggacc

SEQ ID NO: 1767 - DNA, 24 bp, Artificial Sequence
  Description of Artificial Sequence:  Hypothetical Probe Sequence
agtgggactcgtcttgatcgtgcg

SEQ ID NO: 1768 - DNA, 24 bp, Artificial Sequence
  Description of Artificial Sequence:  Hypothetical Probe Sequence
agtgggacccataatccttgtgcg

SEQ ID NO: 1769 - DNA, 24 bp, Artificial Sequence
  Description of Artificial Sequence:  Hypothetical Probe Sequence
agtgacggctcagtgctgcgccat

SEQ ID NO: 1770 - DNA, 24 bp, Artificial Sequence
  Description of Artificial Sequence:  Hypothetical Probe Sequence
agtgacggggtacttgggacgtgc

SEQ ID NO: 1771 - DNA, 24 bp, Artificial Sequence
  Description of Artificial Sequence:  Hypothetical Probe Sequence
agtgacgggatgtgattccccgtt

SEQ ID NO: 1772 - DNA, 24 bp, Artificial Sequence
  Description of Artificial Sequence:  Hypothetical Probe Sequence
agtgacggggacgtcttcccagga

SEQ ID NO: 1773 - DNA, 24 bp, Artificial Sequence
  Description of Artificial Sequence:  Hypothetical Probe Sequence
agtgagcccttgataccagcgcaa

SEQ ID NO: 1774 - DNA, 24 bp, Artificial Sequence
  Description of Artificial Sequence:  Hypothetical Probe Sequence
agtgagccatcgaaagcgttcgaa

SEQ ID NO: 1775 - DNA, 24 bp, Artificial Sequence
  Description of Artificial Sequence:  Hypothetical Probe Sequence
agtgagccggacgtctagccacgg

SEQ ID NO: 1776 - DNA, 24 bp, Artificial Sequence
  Description of Artificial Sequence:  Hypothetical Probe Sequence
acctttgacgaatgcgacggtcgt

SEQ ID NO: 1777 - DNA, 24 bp, Artificial Sequence
  Description of Artificial Sequence:  Hypothetical Probe Sequence
accttgattgcgtgcggtctccta

SEQ ID NO: 1778 - DNA, 24 bp, Artificial Sequence
  Description of Artificial Sequence:  Hypothetical Probe Sequence
accttctgcttgtgcggcttatcg

SEQ ID NO: 1779 - DNA, 24 bp, Artificial Sequence
  Description of Artificial Sequence:  Hypothetical Probe Sequence
accttctgtgcgcagcgtcttccc

SEQ ID NO: 1780 - DNA, 24 bp, Artificial Sequence
  Description of Artificial Sequence:  Hypothetical Probe Sequence
accttgtcccatgtgcccatcacg

SEQ ID NO: 1781 - DNA, 24 bp, Artificial Sequence
  Description of Artificial Sequence:  Hypothetical Probe Sequence
accttcgttcgtatcgtgcgagcc

SEQ ID NO: 1782 - DNA, 24 bp, Artificial Sequence
  Description of Artificial Sequence:  Hypothetical Probe Sequence
accttcgtcgttacggccatacgg

SEQ ID NO: 1783 - DNA, 24 bp, Artificial Sequence
  Description of Artificial Sequence:  Hypothetical Probe Sequence
accttcgttcccttaggatgtgcg

SEQ ID NO: 1784 - DNA, 24 bp, Artificial Sequence
  Description of Artificial Sequence:  Hypothetical Probe Sequence
accttcgtcagcacggtgcgctca

SEQ ID NO: 1785 - DNA, 24 bp, Artificial Sequence
  Description of Artificial Sequence:  Hypothetical Probe Sequence
acctcttggcttcctatgcgtgcg

SEQ ID NO: 1786 - DNA, 24 bp, Artificial Sequence
  Description of Artificial Sequence:  Hypothetical Probe Sequence
acctcgttcttgccatacggcgaa

SEQ ID NO: 1787 - DNA, 24 bp, Artificial Sequence
  Description of Artificial Sequence:  Hypothetical Probe Sequence
acctcgttccatagccctgtgtgc

SEQ ID NO: 1788 - DNA, 24 bp, Artificial Sequence
  Description of Artificial Sequence:  Hypothetical Probe Sequence
acctccatcacggcttgagttgcg

SEQ ID NO: 1789 - DNA, 24 bp, Artificial Sequence
  Description of Artificial Sequence:  Hypothetical Probe Sequence
acctccatacgggatgcacgccta

SEQ ID NO: 1790 - DNA, 24 bp, Artificial Sequence
  Description of Artificial Sequence:  Hypothetical Probe Sequence
acctcgaacgttagcccagcgagt

SEQ ID NO: 1791 - DNA, 24 bp, Artificial Sequence
  Description of Artificial Sequence:  Hypothetical Probe Sequence
acctcgaaggtatgcgctcatgcg

SEQ ID NO: 1792 - DNA, 24 bp, Artificial Sequence
  Description of Artificial Sequence:  Hypothetical Probe Sequence
acctgcttcttgtccccacgagga

SEQ ID NO: 1793 - DNA, 24 bp, Artificial Sequence
  Description of Artificial Sequence:  Hypothetical Probe Sequence
acctgctttgcggagtcgaacgtt

SEQ ID NO: 1794 - DNA, 24 bp, Artificial Sequence
  Description of Artificial Sequence:  Hypothetical Probe Sequence
acctgcttcagccttgcacgtgcg

SEQ ID NO: 1795 - DNA, 24 bp, Artificial Sequence
  Description of Artificial Sequence:  Hypothetical Probe Sequence
acctgcaatgatgcaatgcgtgcg

SEQ ID NO: 1796 - DNA, 24 bp, Artificial Sequence
  Description of Artificial Sequence:  Hypothetical Probe Sequence
acctgcaagagtcttggtgcagcc

SEQ ID NO: 1797 - DNA, 24 bp, Artificial Sequence
  Description of Artificial Sequence:  Hypothetical Probe Sequence
acctagtgccattctgcagcgctt

SEQ ID NO: 1798 - DNA, 24 bp, Artificial Sequence
  Description of Artificial Sequence:  Hypothetical Probe Sequence
accttcccaatcgatggtgcatcg

SEQ ID NO: 1799 - DNA, 24 bp, Artificial Sequence
  Description of Artificial Sequence:  Hypothetical Probe Sequence
accttcccaaagtgattgcggtgc

SEQ ID NO: 1800 - DNA, 24 bp, Artificial Sequence
  Description of Artificial Sequence:  Hypothetical Probe Sequence
accttcccctgtcagcgagttcgt

SEQ ID NO: 1801 - DNA, 24 bp, Artificial Sequence
  Description of Artificial Sequence:  Hypothetical Probe Sequence
accttcccacctcgaacacgccta

SEQ ID NO: 1802 - DNA, 24 bp, Artificial Sequence
  Description of Artificial Sequence:  Hypothetical Probe Sequence
accttcccatcgtcgtcacgtcgt

SEQ ID NO: 1803 - DNA, 24 bp, Artificial Sequence
  Description of Artificial Sequence:  Hypothetical Probe Sequence
accttccccctaagcctccctctg

SEQ ID NO: 1804 - DNA, 24 bp, Artificial Sequence
  Description of Artificial Sequence:  Hypothetical Probe Sequence
accttcccacggctcagatgacgg

SEQ ID NO: 1805 - DNA, 24 bp, Artificial Sequence
  Description of Artificial Sequence:  Hypothetical Probe Sequence
accttgcgttgatgattgcgtcgt

SEQ ID NO: 1806 - DNA, 24 bp, Artificial Sequence
  Description of Artificial Sequence:  Hypothetical Probe Sequence
accttgcgcgaaaaagtcgtcgtt

SEQ ID NO: 1807 - DNA, 24 bp, Artificial Sequence
  Description of Artificial Sequence:  Hypothetical Probe Sequence
accttgcggcttgctttcgtctca

SEQ ID NO: 1808 - DNA, 24 bp, Artificial Sequence
  Description of Artificial Sequence:  Hypothetical Probe Sequence
accttgcgacggcagcacctctca

SEQ ID NO: 1809 - DNA, 24 bp, Artificial Sequence
  Description of Artificial Sequence:  Hypothetical Probe Sequence
acctcacgaaagtcccagccacgg

SEQ ID NO: 1810 - DNA, 24 bp, Artificial Sequence
  Description of Artificial Sequence:  Hypothetical Probe Sequence
acctcacggtcttccccgaagacc

SEQ ID NO: 1811 - DNA, 24 bp, Artificial Sequence
  Description of Artificial Sequence:  Hypothetical Probe Sequence
acctcacggagtctgtacggtgcg

SEQ ID NO: 1812 - DNA, 24 bp, Artificial Sequence
  Description of Artificial Sequence:  Hypothetical Probe Sequence
acctcacgtcccccatacggctca

SEQ ID NO: 1813 - DNA, 24 bp, Artificial Sequence
  Description of Artificial Sequence:  Hypothetical Probe Sequence
acctgacccgaactgtggaccagc

SEQ ID NO: 1814 - DNA, 24 bp, Artificial Sequence
  Description of Artificial Sequence:  Hypothetical Probe Sequence
acctgacccacgaaaggcaacgtt

SEQ ID NO: 1815 - DNA, 24 bp, Artificial Sequence
  Description of Artificial Sequence:  Hypothetical Probe Sequence
acctgaccacggttgatgcgtgtc

SEQ ID NO: 1816 - DNA, 24 bp, Artificial Sequence
  Description of Artificial Sequence:  Hypothetical Probe Sequence
acctgtgcctcagcaagatgacgg

SEQ ID NO: 1817 - DNA, 24 bp, Artificial Sequence
  Description of Artificial Sequence:  Hypothetical Probe Sequence
acctgtgcgagtcgaaacgggtgc

SEQ ID NO: 1818 - DNA, 24 bp, Artificial Sequence
  Description of Artificial Sequence:  Hypothetical Probe Sequence
acctgtgcacctcagcgatgcagc

SEQ ID NO: 1819 - DNA, 24 bp, Artificial Sequence
  Description of Artificial Sequence:  Hypothetical Probe Sequence
acctgtgcaggatcccacggtgtc

SEQ ID NO: 1820 - DNA, 24 bp, Artificial Sequence
  Description of Artificial Sequence:  Hypothetical Probe Sequence
acctgtgccctacacgggacatcg

SEQ ID NO: 1821 - DNA, 24 bp, Artificial Sequence
  Description of Artificial Sequence:  Hypothetical Probe Sequence
acctggaccttgtgcgaatcgctt

SEQ ID NO: 1822 - DNA, 24 bp, Artificial Sequence
  Description of Artificial Sequence:  Hypothetical Probe Sequence
acctggacgatgtgcgctgtagga

SEQ ID NO: 1823 - DNA, 24 bp, Artificial Sequence
  Description of Artificial Sequence:  Hypothetical Probe Sequence
acctggactccctcgtcagcgatg

SEQ ID NO: 1824 - DNA, 24 bp, Artificial Sequence
  Description of Artificial Sequence:  Hypothetical Probe Sequence
acctggacagccaatccacgagcc

SEQ ID NO: 1825 - DNA, 24 bp, Artificial Sequence
  Description of Artificial Sequence:  Hypothetical Probe Sequence
acctacggttgacgaagcaatgcg

SEQ ID NO: 1826 - DNA, 24 bp, Artificial Sequence
  Description of Artificial Sequence:  Hypothetical Probe Sequence
acctacggcgttcgaagcttggta

SEQ ID NO: 1827 - DNA, 24 bp, Artificial Sequence
  Description of Artificial Sequence:  Hypothetical Probe Sequence
atcgttgacgaaagccagccgcaa

SEQ ID NO: 1828 - DNA, 24 bp, Artificial Sequence
  Description of Artificial Sequence:  Hypothetical Probe Sequence
atcgttgaaggatgcggaccatcg

SEQ ID NO: 1829 - DNA, 24 bp, Artificial Sequence
  Description of Artificial Sequence:  Hypothetical Probe Sequence
atcgttgaacggtgcgtctggatg

SEQ ID NO: 1830 - DNA, 24 bp, Artificial Sequence
  Description of Artificial Sequence:  Hypothetical Probe Sequence
atcgtgatcacggtgcacggcgaa

SEQ ID NO: 1831 - DNA, 24 bp, Artificial Sequence
  Description of Artificial Sequence:  Hypothetical Probe Sequence
atcgttaggtgcaccttgcgccta

SEQ ID NO: 1832 - DNA, 24 bp, Artificial Sequence
  Description of Artificial Sequence:  Hypothetical Probe Sequence
atcgaatccgttacggtgcgtgtc

SEQ ID NO: 1833 - DNA, 24 bp, Artificial Sequence
  Description of Artificial Sequence:  Hypothetical Probe Sequence
atcgaatcctcaatcggcaacacg

SEQ ID NO: 1834 - DNA, 24 bp, Artificial Sequence
  Description of Artificial Sequence:  Hypothetical Probe Sequence
atcgaatcatcgggacagccacgg

SEQ ID NO: 1835 - DNA, 24 bp, Artificial Sequence
  Description of Artificial Sequence:  Hypothetical Probe Sequence
atcgaatcgacctgcgtcccatcg

SEQ ID NO: 1836 - DNA, 24 bp, Artificial Sequence
  Description of Artificial Sequence:  Hypothetical Probe Sequence
atcgaatcggaccttgatcggtgc

SEQ ID NO: 1837 - DNA, 24 bp, Artificial Sequence
  Description of Artificial Sequence:  Hypothetical Probe Sequence
atcgatacgctttgcgctgtatcg

SEQ ID NO: 1838 - DNA, 24 bp, Artificial Sequence
  Description of Artificial Sequence:  Hypothetical Probe Sequence
atcgataccagcccattgcggcaa

SEQ ID NO: 1839 - DNA, 24 bp, Artificial Sequence
  Description of Artificial Sequence:  Hypothetical Probe Sequence
atcgatacacggttgaacggcgaa

SEQ ID NO: 1840 - DNA, 24 bp, Artificial Sequence
  Description of Artificial Sequence:  Hypothetical Probe Sequence
atcgtctgccatgcttcacgacgg

SEQ ID NO: 1841 - DNA, 24 bp, Artificial Sequence
  Description of Artificial Sequence:  Hypothetical Probe Sequence
atcgtctgcctaagccgatgacgg

SEQ ID NO: 1842 - DNA, 24 bp, Artificial Sequence
  Description of Artificial Sequence:  Hypothetical Probe Sequence
atcgtctgcagcggacagtggcaa

SEQ ID NO: 1843 - DNA, 24 bp, Artificial Sequence
  Description of Artificial Sequence:  Hypothetical Probe Sequence
atcgtgtcccattcgtgcaacacg

SEQ ID NO: 1844 - DNA, 24 bp, Artificial Sequence
  Description of Artificial Sequence:  Hypothetical Probe Sequence
atcgtgtcgtgcgatgacggtgcg

SEQ ID NO: 1845 - DNA, 24 bp, Artificial Sequence
  Description of Artificial Sequence:  Hypothetical Probe Sequence
atcgtcgtttgacacgggacgcaa

SEQ ID NO: 1846 - DNA, 24 bp, Artificial Sequence
  Description of Artificial Sequence:  Hypothetical Probe Sequence
atcgtcgtgatgggacgctttccc

SEQ ID NO: 1847 - DNA, 24 bp, Artificial Sequence
  Description of Artificial Sequence:  Hypothetical Probe Sequence
atcgtcgtgtgcttgactgttgcg

SEQ ID NO: 1848 - DNA, 24 bp, Artificial Sequence
  Description of Artificial Sequence:  Hypothetical Probe Sequence
atcgtcgtagcccagctctgcgaa

SEQ ID NO: 1849 - DNA, 24 bp, Artificial Sequence
  Description of Artificial Sequence:  Hypothetical Probe Sequence
atcgcttgcttgcgaagcaagctt

SEQ ID NO: 1850 - DNA, 24 bp, Artificial Sequence
  Description of Artificial Sequence:  Hypothetical Probe Sequence
atcgcttgggtatcgttgcgttga

SEQ ID NO: 1851 - DNA, 24 bp, Artificial Sequence
  Description of Artificial Sequence:  Hypothetical Probe Sequence
atcgcttgaccttgtcgctttccc

SEQ ID NO: 1852 - DNA, 24 bp, Artificial Sequence
  Description of Artificial Sequence:  Hypothetical Probe Sequence
atcgcttgcctatgatcagcagcc

SEQ ID NO: 1853 - DNA, 24 bp, Artificial Sequence
  Description of Artificial Sequence:  Hypothetical Probe Sequence
atcgcttgcacggagttcccacct

SEQ ID NO: 1854 - DNA, 24 bp, Artificial Sequence
  Description of Artificial Sequence:  Hypothetical Probe Sequence
atcgcgtttgatacggtctggtgc

SEQ ID NO: 1855 - DNA, 24 bp, Artificial Sequence
  Description of Artificial Sequence:  Hypothetical Probe Sequence
atcgcgttttaggcttagccgctt

SEQ ID NO: 1856 - DNA, 24 bp, Artificial Sequence
  Description of Artificial Sequence:  Hypothetical Probe Sequence
atcgcgttaaagcacggtctgtgc

SEQ ID NO: 1857 - DNA, 24 bp, Artificial Sequence
  Description of Artificial Sequence:  Hypothetical Probe Sequence
atcgcgttcttgggtaagccacct

SEQ ID NO: 1858 - DNA, 24 bp, Artificial Sequence
  Description of Artificial Sequence:  Hypothetical Probe Sequence
atcgcgttcgttcagcatcggagt

SEQ ID NO: 1859 - DNA, 24 bp, Artificial Sequence
  Description of Artificial Sequence:  Hypothetical Probe Sequence
atcgcgttctgttccccgaaccta

SEQ ID NO: 1860 - DNA, 24 bp, Artificial Sequence
  Description of Artificial Sequence:  Hypothetical Probe Sequence
atcgcgttggtatgtccagcgagt

SEQ ID NO: 1861 - DNA, 24 bp, Artificial Sequence
  Description of Artificial Sequence:  Hypothetical Probe Sequence
atcgcgttagtgtctgacggcacg

SEQ ID NO: 1862 - DNA, 24 bp, Artificial Sequence
  Description of Artificial Sequence:  Hypothetical Probe Sequence
atcgcgttatcggcttagtgcacg

SEQ ID NO: 1863 - DNA, 24 bp, Artificial Sequence
  Description of Artificial Sequence:  Hypothetical Probe Sequence
atcgcgttgatgtacaccattgcg

SEQ ID NO: 1864 - DNA, 24 bp, Artificial Sequence
  Description of Artificial Sequence:  Hypothetical Probe Sequence
atcgcgttggactacaagcccttg

SEQ ID NO: 1865 - DNA, 24 bp, Artificial Sequence
  Description of Artificial Sequence:  Hypothetical Probe Sequence
atcgctcatgatacggtccccacg

SEQ ID NO: 1866 - DNA, 24 bp, Artificial Sequence
  Description of Artificial Sequence:  Hypothetical Probe Sequence
atcgctcacgtttgcgacctgtgc

SEQ ID NO: 1867 - DNA, 24 bp, Artificial Sequence
  Description of Artificial Sequence:  Hypothetical Probe Sequence
atcgctcagatggcaagacctgcg

SEQ ID NO: 1868 - DNA, 24 bp, Artificial Sequence
  Description of Artificial Sequence:  Hypothetical Probe Sequence
atcgctgttgattcccagcctgcg

SEQ ID NO: 1869 - DNA, 24 bp, Artificial Sequence
  Description of Artificial Sequence:  Hypothetical Probe Sequence
atcgctgttgtccacgcacgggac

SEQ ID NO: 1870 - DNA, 24 bp, Artificial Sequence
  Description of Artificial Sequence:  Hypothetical Probe Sequence
atcgctgtcttgccattgcgcagc

SEQ ID NO: 1871 - DNA, 24 bp, Artificial Sequence
  Description of Artificial Sequence:  Hypothetical Probe Sequence
atcgctgtgcaatgcgtgtcctgt

SEQ ID NO: 1872 - DNA, 24 bp, Artificial Sequence
  Description of Artificial Sequence:  Hypothetical Probe Sequence
atcgctgttgcgcgtttgatcagc

SEQ ID NO: 1873 - DNA, 24 bp, Artificial Sequence
  Description of Artificial Sequence:  Hypothetical Probe Sequence
atcgctgtcacgaatctgcgctgt

SEQ ID NO: 1874 - DNA, 24 bp, Artificial Sequence
  Description of Artificial Sequence:  Hypothetical Probe Sequence
atcgctgtgaccgaccctcatgcg

SEQ ID NO: 1875 - DNA, 24 bp, Artificial Sequence
  Description of Artificial Sequence:  Hypothetical Probe Sequence
atcgccatttgatgcgtgatcgaa

SEQ ID NO: 1876 - DNA, 24 bp, Artificial Sequence
  Description of Artificial Sequence:  Hypothetical Probe Sequence
atcgccattgatcgaacttgcgaa

SEQ ID NO: 1877 - DNA, 24 bp, Artificial Sequence
  Description of Artificial Sequence:  Hypothetical Probe Sequence
atcgccattcgtaatccgttcgtt

SEQ ID NO: 1878 - DNA, 24 bp, Artificial Sequence
  Description of Artificial Sequence:  Hypothetical Probe Sequence
atcgccatcttgaaagcttggctt

SEQ ID NO: 1879 - DNA, 24 bp, Artificial Sequence
  Description of Artificial Sequence:  Hypothetical Probe Sequence
atcgccatctcacttgcgaaacgg

SEQ ID NO: 1880 - DNA, 24 bp, Artificial Sequence
  Description of Artificial Sequence:  Hypothetical Probe Sequence
atcgccatgcttctgtgtgctcgt

SEQ ID NO: 1881 - DNA, 24 bp, Artificial Sequence
  Description of Artificial Sequence:  Hypothetical Probe Sequence
atcgccataggaagcccgttctca

SEQ ID NO: 1882 - DNA, 24 bp, Artificial Sequence
  Description of Artificial Sequence:  Hypothetical Probe Sequence
atcgccatcctaaggaacggtcgt

SEQ ID NO: 1883 - DNA, 24 bp, Artificial Sequence
  Description of Artificial Sequence:  Hypothetical Probe Sequence
atcgccatgtgcttaggcaaatcg

SEQ ID NO: 1884 - DNA, 24 bp, Artificial Sequence
  Description of Artificial Sequence:  Hypothetical Probe Sequence
atcgcgaaatacctcatcccacgg

SEQ ID NO: 1885 - DNA, 24 bp, Artificial Sequence
  Description of Artificial Sequence:  Hypothetical Probe Sequence
atcgcgaatctgctcatgcgaaag

SEQ ID NO: 1886 - DNA, 24 bp, Artificial Sequence
  Description of Artificial Sequence:  Hypothetical Probe Sequence
atcgcgaatcgtggtaaatcgtgc

SEQ ID NO: 1887 - DNA, 24 bp, Artificial Sequence
  Description of Artificial Sequence:  Hypothetical Probe Sequence
atcgcgaactgtcttgcacgagcc

SEQ ID NO: 1888 - DNA, 24 bp, Artificial Sequence
  Description of Artificial Sequence:  Hypothetical Probe Sequence
atcgcgaaggtattgagaccagcc

SEQ ID NO: 1889 - DNA, 24 bp, Artificial Sequence
  Description of Artificial Sequence:  Hypothetical Probe Sequence
atcgcgaagtctcgaagcaaagga

SEQ ID NO: 1890 - DNA, 24 bp, Artificial Sequence
  Description of Artificial Sequence:  Hypothetical Probe Sequence
atcgcgaaacctccatggtatccc

SEQ ID NO: 1891 - DNA, 24 bp, Artificial Sequence
  Description of Artificial Sequence:  Hypothetical Probe Sequence
atcgcgaacctacagctcgtagcc

SEQ ID NO: 1892 - DNA, 24 bp, Artificial Sequence
  Description of Artificial Sequence:  Hypothetical Probe Sequence
atcgcgaatgcgtgtcgcaactgt

SEQ ID NO: 1893 - DNA, 24 bp, Artificial Sequence
  Description of Artificial Sequence:  Hypothetical Probe Sequence
atcgcgaagaccataccacgacgg

SEQ ID NO: 1894 - DNA, 24 bp, Artificial Sequence
  Description of Artificial Sequence:  Hypothetical Probe Sequence
atcggcttttagccatcagctgcg

SEQ ID NO: 1895 - DNA, 24 bp, Artificial Sequence
  Description of Artificial Sequence:  Hypothetical Probe Sequence
atcggctttacaccatgtgcggac

SEQ ID NO: 1896 - DNA, 24 bp, Artificial Sequence
  Description of Artificial Sequence:  Hypothetical Probe Sequence
atcggctttctgttgacagcgacc

SEQ ID NO: 1897 - DNA, 24 bp, Artificial Sequence
  Description of Artificial Sequence:  Hypothetical Probe Sequence
atcggcttcgttgaccacctggac

SEQ ID NO: 1898 - DNA, 24 bp, Artificial Sequence
  Description of Artificial Sequence:  Hypothetical Probe Sequence
atcggcttctgtatcggacccagc

SEQ ID NO: 1899 - DNA, 24 bp, Artificial Sequence
  Description of Artificial Sequence:  Hypothetical Probe Sequence
atcggcttgtgcttagcagcctca

SEQ ID NO: 1900 - DNA, 24 bp, Artificial Sequence
  Description of Artificial Sequence:  Hypothetical Probe Sequence
atcgggtacgttaggacacgcgtt

SEQ ID NO: 1901 - DNA, 24 bp, Artificial Sequence
  Description of Artificial Sequence:  Hypothetical Probe Sequence
atcgggtagcaagtctcagcgtgc

SEQ ID NO: 1902 - DNA, 24 bp, Artificial Sequence
  Description of Artificial Sequence:  Hypothetical Probe Sequence
atcgggtaaggaacctgcaagcaa

SEQ ID NO: 1903 - DNA, 24 bp, Artificial Sequence
  Description of Artificial Sequence:  Hypothetical Probe Sequence
atcgggtatcccaggaccatcgaa

SEQ ID NO: 1904 - DNA, 24 bp, Artificial Sequence
  Description of Artificial Sequence:  Hypothetical Probe Sequence
atcgggtaacggtacagcaaagcc

SEQ ID NO: 1905 - DNA, 24 bp, Artificial Sequence
  Description of Artificial Sequence:  Hypothetical Probe Sequence
atcgggtaagcctgatacggagcc

SEQ ID NO: 1906 - DNA, 24 bp, Artificial Sequence
  Description of Artificial Sequence:  Hypothetical Probe Sequence
atcggtctcgaaaatcgcaacgaa

SEQ ID NO: 1907 - DNA, 24 bp, Artificial Sequence
  Description of Artificial Sequence:  Hypothetical Probe Sequence
atcggtctgcttagccggtaagcc

SEQ ID NO: 1908 - DNA, 24 bp, Artificial Sequence
  Description of Artificial Sequence:  Hypothetical Probe Sequence
atcggtctatcgcacgggaccagc

SEQ ID NO: 1909 - DNA, 24 bp, Artificial Sequence
  Description of Artificial Sequence:  Hypothetical Probe Sequence
atcggtctacggccatggaccttg

SEQ ID NO: 1910 - DNA, 24 bp, Artificial Sequence
  Description of Artificial Sequence:  Hypothetical Probe Sequence
atcggagtgcaagcttgaccggac

SEQ ID NO: 1911 - DNA, 24 bp, Artificial Sequence
  Description of Artificial Sequence:  Hypothetical Probe Sequence
atcggagtatcgcttgcagcgcaa

SEQ ID NO: 1912 - DNA, 24 bp, Artificial Sequence
  Description of Artificial Sequence:  Hypothetical Probe Sequence
atcggagtcagcttagacggcacg

SEQ ID NO: 1913 - DNA, 24 bp, Artificial Sequence
  Description of Artificial Sequence:  Hypothetical Probe Sequence
atcggcaatgattgcgacctgacc

SEQ ID NO: 1914 - DNA, 24 bp, Artificial Sequence
  Description of Artificial Sequence:  Hypothetical Probe Sequence
atcggcaatacaaatcgcaaagcc

SEQ ID NO: 1915 - DNA, 24 bp, Artificial Sequence
  Description of Artificial Sequence:  Hypothetical Probe Sequence
atcggcaatgtctccctctgcacg

SEQ ID NO: 1916 - DNA, 24 bp, Artificial Sequence
  Description of Artificial Sequence:  Hypothetical Probe Sequence
atcggcaactcaaaagggaccacg

SEQ ID NO: 1917 - DNA, 24 bp, Artificial Sequence
  Description of Artificial Sequence:  Hypothetical Probe Sequence
atcggcaaccataccttctggcaa

SEQ ID NO: 1918 - DNA, 24 bp, Artificial Sequence
  Description of Artificial Sequence:  Hypothetical Probe Sequence
atcggcaagcttttagatcgcgaa

SEQ ID NO: 1919 - DNA, 24 bp, Artificial Sequence
  Description of Artificial Sequence:  Hypothetical Probe Sequence
atcggcaagagtagccgtctgtgc

SEQ ID NO: 1920 - DNA, 24 bp, Artificial Sequence
  Description of Artificial Sequence:  Hypothetical Probe Sequence
atcggcaagcaatcgtagtggcaa

SEQ ID NO: 1921 - DNA, 24 bp, Artificial Sequence
  Description of Artificial Sequence:  Hypothetical Probe Sequence
atcggcaaagtgcttgatcgtccc

SEQ ID NO: 1922 - DNA, 24 bp, Artificial Sequence
  Description of Artificial Sequence:  Hypothetical Probe Sequence
atcggcaaaggaagtggtgctcgt

SEQ ID NO: 1923 - DNA, 24 bp, Artificial Sequence
  Description of Artificial Sequence:  Hypothetical Probe Sequence
atcggcaacagcagtgctgtgtgc

SEQ ID NO: 1924 - DNA, 24 bp, Artificial Sequence
  Description of Artificial Sequence:  Hypothetical Probe Sequence
atcggcaaggactgtcggtaatcg

SEQ ID NO: 1925 - DNA, 24 bp, Artificial Sequence
  Description of Artificial Sequence:  Hypothetical Probe Sequence
atcgagtgcgaatgatggaccacg

SEQ ID NO: 1926 - DNA, 24 bp, Artificial Sequence
  Description of Artificial Sequence:  Hypothetical Probe Sequence
atcgagtgcctatgcgctcacagc

SEQ ID NO: 1927 - DNA, 24 bp, Artificial Sequence
  Description of Artificial Sequence:  Hypothetical Probe Sequence
atcgagtggtgcttgaacggagcc

SEQ ID NO: 1928 - DNA, 24 bp, Artificial Sequence
  Description of Artificial Sequence:  Hypothetical Probe Sequence
atcgacctggtaacggcacggacc

SEQ ID NO: 1929 - DNA, 24 bp, Artificial Sequence
  Description of Artificial Sequence:  Hypothetical Probe Sequence
atcgacctgcaatctgaggaacgg

SEQ ID NO: 1930 - DNA, 24 bp, Artificial Sequence
  Description of Artificial Sequence:  Hypothetical Probe Sequence
atcgacctggaccacgtgcgtcgt

SEQ ID NO: 1931 - DNA, 24 bp, Artificial Sequence
  Description of Artificial Sequence:  Hypothetical Probe Sequence
atcgatcgctgtatcgcagccgaa

SEQ ID NO: 1932 - DNA, 24 bp, Artificial Sequence
  Description of Artificial Sequence:  Hypothetical Probe Sequence
atcgatcggcttaggagacccgtt

SEQ ID NO: 1933 - DNA, 24 bp, Artificial Sequence
  Description of Artificial Sequence:  Hypothetical Probe Sequence
atcgatcgaggaagccggacaatc

SEQ ID NO: 1934 - DNA, 24 bp, Artificial Sequence
  Description of Artificial Sequence:  Hypothetical Probe Sequence
atcgatcggtgccgtttgtcagcc

SEQ ID NO: 1935 - DNA, 24 bp, Artificial Sequence
  Description of Artificial Sequence:  Hypothetical Probe Sequence
atcgaggaacctgcttagcccacg

SEQ ID NO: 1936 - DNA, 24 bp, Artificial Sequence
  Description of Artificial Sequence:  Hypothetical Probe Sequence
atcgaggaatcggtgcctgtgcaa

SEQ ID NO: 1937 - DNA, 24 bp, Artificial Sequence
  Description of Artificial Sequence:  Hypothetical Probe Sequence
atcgcctatgatacggcagcctca

SEQ ID NO: 1938 - DNA, 24 bp, Artificial Sequence
  Description of Artificial Sequence:  Hypothetical Probe Sequence
atcgcctaaaagctcaagccacgg

SEQ ID NO: 1939 - DNA, 24 bp, Artificial Sequence
  Description of Artificial Sequence:  Hypothetical Probe Sequence
atcgcctatgtcccattgcgagcc

SEQ ID NO: 1940 - DNA, 24 bp, Artificial Sequence
  Description of Artificial Sequence:  Hypothetical Probe Sequence
atcgcctacgtttcgtccattccc

SEQ ID NO: 1941 - DNA, 24 bp, Artificial Sequence
  Description of Artificial Sequence:  Hypothetical Probe Sequence
atcgcctagctttcccctcatcgt

SEQ ID NO: 1942 - DNA, 24 bp, Artificial Sequence
  Description of Artificial Sequence:  Hypothetical Probe Sequence
atcgcctaaggaatacacggcacg

SEQ ID NO: 1943 - DNA, 24 bp, Artificial Sequence
  Description of Artificial Sequence:  Hypothetical Probe Sequence
atcgcctatgcgggtatcgttcgt

SEQ ID NO: 1944 - DNA, 24 bp, Artificial Sequence
  Description of Artificial Sequence:  Hypothetical Probe Sequence
atcgcctacacggcttcgtttcgt

SEQ ID NO: 1945 - DNA, 24 bp, Artificial Sequence
  Description of Artificial Sequence:  Hypothetical Probe Sequence
atcggatgttgagcaaagcctgcg

SEQ ID NO: 1946 - DNA, 24 bp, Artificial Sequence
  Description of Artificial Sequence:  Hypothetical Probe Sequence
atcggatgtcgtggacgaccagcc

SEQ ID NO: 1947 - DNA, 24 bp, Artificial Sequence
  Description of Artificial Sequence:  Hypothetical Probe Sequence
atcggatgctcaacggaatccgtt

SEQ ID NO: 1948 - DNA, 24 bp, Artificial Sequence
  Description of Artificial Sequence:  Hypothetical Probe Sequence
atcggatgctgtcgttacggatcg

SEQ ID NO: 1949 - DNA, 24 bp, Artificial Sequence
  Description of Artificial Sequence:  Hypothetical Probe Sequence
atcggatggtctgtgccagcggac

SEQ ID NO: 1950 - DNA, 24 bp, Artificial Sequence
  Description of Artificial Sequence:  Hypothetical Probe Sequence
atcggatgatcgaggaacggggac

SEQ ID NO: 1951 - DNA, 24 bp, Artificial Sequence
  Description of Artificial Sequence:  Hypothetical Probe Sequence
atcggatgcctagtcttccccacg

SEQ ID NO: 1952 - DNA, 24 bp, Artificial Sequence
  Description of Artificial Sequence:  Hypothetical Probe Sequence
atcggatgtgcgcttgtgattgcg

SEQ ID NO: 1953 - DNA, 24 bp, Artificial Sequence
  Description of Artificial Sequence:  Hypothetical Probe Sequence
atcggatgcacgcttggcttggac

SEQ ID NO: 1954 - DNA, 24 bp, Artificial Sequence
  Description of Artificial Sequence:  Hypothetical Probe Sequence
atcggatgcagcttagtgcggatg

SEQ ID NO: 1955 - DNA, 24 bp, Artificial Sequence
  Description of Artificial Sequence:  Hypothetical Probe Sequence
atcggatgggacagcctgatgcaa

SEQ ID NO: 1956 - DNA, 24 bp, Artificial Sequence
  Description of Artificial Sequence:  Hypothetical Probe Sequence
atcggatgacggcttgtcccgatg

SEQ ID NO: 1957 - DNA, 24 bp, Artificial Sequence
  Description of Artificial Sequence:  Hypothetical Probe Sequence
atcgtccctgtccgaatgcgcacg

SEQ ID NO: 1958 - DNA, 24 bp, Artificial Sequence
  Description of Artificial Sequence:  Hypothetical Probe Sequence
atcgtcccaggatcgtgcttagcc

SEQ ID NO: 1959 - DNA, 24 bp, Artificial Sequence
  Description of Artificial Sequence:  Hypothetical Probe Sequence
atcgtcccgatgcctacgtttccc

SEQ ID NO: 1960 - DNA, 24 bp, Artificial Sequence
  Description of Artificial Sequence:  Hypothetical Probe Sequence
atcgtgcgttgatgtccgttagcc

SEQ ID NO: 1961 - DNA, 24 bp, Artificial Sequence
  Description of Artificial Sequence:  Hypothetical Probe Sequence
atcgtgcgttagtccctccccgtt

SEQ ID NO: 1962 - DNA, 24 bp, Artificial Sequence
  Description of Artificial Sequence:  Hypothetical Probe Sequence
atcgtgcgcttgcttgcacgtgat

SEQ ID NO: 1963 - DNA, 24 bp, Artificial Sequence
  Description of Artificial Sequence:  Hypothetical Probe Sequence
atcgtgcgctcatgtctcccaaag

SEQ ID NO: 1964 - DNA, 24 bp, Artificial Sequence
  Description of Artificial Sequence:  Hypothetical Probe Sequence
atcgtgcgccatcctagcaaatcg

SEQ ID NO: 1965 - DNA, 24 bp, Artificial Sequence
  Description of Artificial Sequence:  Hypothetical Probe Sequence
atcgtgcggcttccataatcgacc

SEQ ID NO: 1966 - DNA, 24 bp, Artificial Sequence
  Description of Artificial Sequence:  Hypothetical Probe Sequence
atcgtgcggagtgctttcgtgacc

SEQ ID NO: 1967 - DNA, 24 bp, Artificial Sequence
  Description of Artificial Sequence:  Hypothetical Probe Sequence
atcgtgcgtccccagcaaagagga

SEQ ID NO: 1968 - DNA, 24 bp, Artificial Sequence
  Description of Artificial Sequence:  Hypothetical Probe Sequence
atcgtgcgcacgtacaagccacct

SEQ ID NO: 1969 - DNA, 24 bp, Artificial Sequence
  Description of Artificial Sequence:  Hypothetical Probe Sequence
atcgtgcggtgcggtaccattcgt

SEQ ID NO: 1970 - DNA, 24 bp, Artificial Sequence
  Description of Artificial Sequence:  Hypothetical Probe Sequence
atcgcacgaaaggaccgcttgatg

SEQ ID NO: 1971 - DNA, 24 bp, Artificial Sequence
  Description of Artificial Sequence:  Hypothetical Probe Sequence
atcgcacgcttggtctacggacgg

SEQ ID NO: 1972 - DNA, 24 bp, Artificial Sequence
  Description of Artificial Sequence:  Hypothetical Probe Sequence
atcgcacgcgaagagtcgttcgaa

SEQ ID NO: 1973 - DNA, 24 bp, Artificial Sequence
  Description of Artificial Sequence:  Hypothetical Probe Sequence
atcgcacggcttacctcacgggta

SEQ ID NO: 1974 - DNA, 24 bp, Artificial Sequence
  Description of Artificial Sequence:  Hypothetical Probe Sequence
atcgcacgagtgttagtgcgcgtt

SEQ ID NO: 1975 - DNA, 24 bp, Artificial Sequence
  Description of Artificial Sequence:  Hypothetical Probe Sequence
atcgcacgacctgcaaaggagtgc

SEQ ID NO: 1976 - DNA, 24 bp, Artificial Sequence
  Description of Artificial Sequence:  Hypothetical Probe Sequence
atcgcacgtcccctcacgaagctt

SEQ ID NO: 1977 - DNA, 24 bp, Artificial Sequence
  Description of Artificial Sequence:  Hypothetical Probe Sequence
atcgcacgtgcgctcagtgcatcg

SEQ ID NO: 1978 - DNA, 24 bp, Artificial Sequence
  Description of Artificial Sequence:  Hypothetical Probe Sequence
atcgcacgacggctgtgcaaacct

SEQ ID NO: 1979 - DNA, 24 bp, Artificial Sequence
  Description of Artificial Sequence:  Hypothetical Probe Sequence
atcgcacgagccatacgaccgatg

SEQ ID NO: 1980 - DNA, 24 bp, Artificial Sequence
  Description of Artificial Sequence:  Hypothetical Probe Sequence
atcgcagcttagcgaagcaagcaa

SEQ ID NO: 1981 - DNA, 24 bp, Artificial Sequence
  Description of Artificial Sequence:  Hypothetical Probe Sequence
atcgcagctctgttgaggactgcg

SEQ ID NO: 1982 - DNA, 24 bp, Artificial Sequence
  Description of Artificial Sequence:  Hypothetical Probe Sequence
atcgcagctgtcgagtgtgcgcaa

SEQ ID NO: 1983 - DNA, 24 bp, Artificial Sequence
  Description of Artificial Sequence:  Hypothetical Probe Sequence
atcgcagctcgtcctacagcggac

SEQ ID NO: 1984 - DNA, 24 bp, Artificial Sequence
  Description of Artificial Sequence:  Hypothetical Probe Sequence
atcgcagcgtctcttgggacccta

SEQ ID NO: 1985 - DNA, 24 bp, Artificial Sequence
  Description of Artificial Sequence:  Hypothetical Probe Sequence
atcgcagcagtgtgtccgttcgtt

SEQ ID NO: 1986 - DNA, 24 bp, Artificial Sequence
  Description of Artificial Sequence:  Hypothetical Probe Sequence
atcgcagcatcgatacgtgcacct

SEQ ID NO: 1987 - DNA, 24 bp, Artificial Sequence
  Description of Artificial Sequence:  Hypothetical Probe Sequence
atcgcagcggacatactgcgagga

SEQ ID NO: 1988 - DNA, 24 bp, Artificial Sequence
  Description of Artificial Sequence:  Hypothetical Probe Sequence
atcgcagcacggctcacgaagtgc

SEQ ID NO: 1989 - DNA, 24 bp, Artificial Sequence
  Description of Artificial Sequence:  Hypothetical Probe Sequence
atcggacctacaagccgaccctgt

SEQ ID NO: 1990 - DNA, 24 bp, Artificial Sequence
  Description of Artificial Sequence:  Hypothetical Probe Sequence
atcggacccgttccattctggtgc

SEQ ID NO: 1991 - DNA, 24 bp, Artificial Sequence
  Description of Artificial Sequence:  Hypothetical Probe Sequence
atcggaccgcaagatgtgtcgtgc

SEQ ID NO: 1992 - DNA, 24 bp, Artificial Sequence
  Description of Artificial Sequence:  Hypothetical Probe Sequence
atcggaccatcgagtggcttcgaa

SEQ ID NO: 1993 - DNA, 24 bp, Artificial Sequence
  Description of Artificial Sequence:  Hypothetical Probe Sequence
atcggacctgcgtgtcaatcccat

SEQ ID NO: 1994 - DNA, 24 bp, Artificial Sequence
  Description of Artificial Sequence:  Hypothetical Probe Sequence
atcggaccggacttgacgtttgtc

SEQ ID NO: 1995 - DNA, 24 bp, Artificial Sequence
  Description of Artificial Sequence:  Hypothetical Probe Sequence
atcggaccacggccataggagcaa

SEQ ID NO: 1996 - DNA, 24 bp, Artificial Sequence
  Description of Artificial Sequence:  Hypothetical Probe Sequence
atcggtgcttgatgatcagccgaa

SEQ ID NO: 1997 - DNA, 24 bp, Artificial Sequence
  Description of Artificial Sequence:  Hypothetical Probe Sequence
atcggtgctgtcacctacgggcaa

SEQ ID NO: 1998 - DNA, 24 bp, Artificial Sequence
  Description of Artificial Sequence:  Hypothetical Probe Sequence
atcggtgcctcacgaacctacacg

SEQ ID NO: 1999 - DNA, 24 bp, Artificial Sequence
  Description of Artificial Sequence:  Hypothetical Probe Sequence
atcggtgcggtagtctgaccggta

SEQ ID NO: 2000 - DNA, 24 bp, Artificial Sequence
  Description of Artificial Sequence:  Hypothetical Probe Sequence
atcggtgcgatgttaggcaagtgc

SEQ ID NO: 2001 - DNA, 24 bp, Artificial Sequence
  Description of Artificial Sequence:  Hypothetical Probe Sequence
atcggtgccacgctgtggacgctt

SEQ ID NO: 2002 - DNA, 24 bp, Artificial Sequence
  Description of Artificial Sequence:  Hypothetical Probe Sequence
atcggtgcggacagtgcacgaaag

SEQ ID NO: 2003 - DNA, 24 bp, Artificial Sequence
  Description of Artificial Sequence:  Hypothetical Probe Sequence
atcggtgcagccgagtcgttagcc

SEQ ID NO: 2004 - DNA, 24 bp, Artificial Sequence
  Description of Artificial Sequence:  Hypothetical Probe Sequence
atcgggacaaagacggctgttccc

SEQ ID NO: 2005 - DNA, 24 bp, Artificial Sequence
  Description of Artificial Sequence:  Hypothetical Probe Sequence
atcgggaccgttcctatccctctg

SEQ ID NO: 2006 - DNA, 24 bp, Artificial Sequence
  Description of Artificial Sequence:  Hypothetical Probe Sequence
atcgggaccgaagagtacggggac

SEQ ID NO: 2007 - DNA, 24 bp, Artificial Sequence
  Description of Artificial Sequence:  Hypothetical Probe Sequence
atcgggacgcttgatgtcgtcacg

SEQ ID NO: 2008 - DNA, 24 bp, Artificial Sequence
  Description of Artificial Sequence:  Hypothetical Probe Sequence
atcgggacggtaggtaaaagcacg

SEQ ID NO: 2009 - DNA, 24 bp, Artificial Sequence
  Description of Artificial Sequence:  Hypothetical Probe Sequence
atcgggacgagtaaagtccccacg

SEQ ID NO: 2010 - DNA, 24 bp, Artificial Sequence
  Description of Artificial Sequence:  Hypothetical Probe Sequence
atcgggacacctggtatccccgtt

SEQ ID NO: 2011 - DNA, 24 bp, Artificial Sequence
  Description of Artificial Sequence:  Hypothetical Probe Sequence
atcgggactcccttgacttggcaa

SEQ ID NO: 2012 - DNA, 24 bp, Artificial Sequence
  Description of Artificial Sequence:  Hypothetical Probe Sequence
atcgggacacggaggacgttcttg

SEQ ID NO: 2013 - DNA, 24 bp, Artificial Sequence
  Description of Artificial Sequence:  Hypothetical Probe Sequence
atcgacggttgatctggtgctgcg

SEQ ID NO: 2014 - DNA, 24 bp, Artificial Sequence
  Description of Artificial Sequence:  Hypothetical Probe Sequence
atcgacggatacacggagccgcaa

SEQ ID NO: 2015 - DNA, 24 bp, Artificial Sequence
  Description of Artificial Sequence:  Hypothetical Probe Sequence
atcgacggtacaacgggaccggac

SEQ ID NO: 2016 - DNA, 24 bp, Artificial Sequence
  Description of Artificial Sequence:  Hypothetical Probe Sequence
atcgacggcttgttagcttgcacg

SEQ ID NO: 2017 - DNA, 24 bp, Artificial Sequence
  Description of Artificial Sequence:  Hypothetical Probe Sequence
atcgacggctgttgatcgttgcaa

SEQ ID NO: 2018 - DNA, 24 bp, Artificial Sequence
  Description of Artificial Sequence:  Hypothetical Probe Sequence
atcgacggccattacaggtatgcg

SEQ ID NO: 2019 - DNA, 24 bp, Artificial Sequence
  Description of Artificial Sequence:  Hypothetical Probe Sequence
atcgacggatcgggtacgaaacct

SEQ ID NO: 2020 - DNA, 24 bp, Artificial Sequence
  Description of Artificial Sequence:  Hypothetical Probe Sequence
atcgacggaggacgaacgaaagtg

SEQ ID NO: 2021 - DNA, 24 bp, Artificial Sequence
  Description of Artificial Sequence:  Hypothetical Probe Sequence
atcgacgggatgagtgtcccggac

SEQ ID NO: 2022 - DNA, 24 bp, Artificial Sequence
  Description of Artificial Sequence:  Hypothetical Probe Sequence
atcgacggacggaatccagccgaa

SEQ ID NO: 2023 - DNA, 24 bp, Artificial Sequence
  Description of Artificial Sequence:  Hypothetical Probe Sequence
atcgacggagccccatacctcacg

SEQ ID NO: 2024 - DNA, 24 bp, Artificial Sequence
  Description of Artificial Sequence:  Hypothetical Probe Sequence
atcgagcctgatggtaagcccgtt

SEQ ID NO: 2025 - DNA, 24 bp, Artificial Sequence
  Description of Artificial Sequence:  Hypothetical Probe Sequence
atcgagccttaggaccgcttcacg

SEQ ID NO: 2026 - DNA, 24 bp, Artificial Sequence
  Description of Artificial Sequence:  Hypothetical Probe Sequence
atcgagcctgtctcccatcgtccc

SEQ ID NO: 2027 - DNA, 24 bp, Artificial Sequence
  Description of Artificial Sequence:  Hypothetical Probe Sequence
atcgagcccttgatcgacctcgtt

SEQ ID NO: 2028 - DNA, 24 bp, Artificial Sequence
  Description of Artificial Sequence:  Hypothetical Probe Sequence
atcgagccctgtgtctacggcgtt

SEQ ID NO: 2029 - DNA, 24 bp, Artificial Sequence
  Description of Artificial Sequence:  Hypothetical Probe Sequence
atcgagccggtaacctgcaaggac

SEQ ID NO: 2030 - DNA, 24 bp, Artificial Sequence
  Description of Artificial Sequence:  Hypothetical Probe Sequence
atcgagccgcaatgtcctgtcacg

SEQ ID NO: 2031 - DNA, 24 bp, Artificial Sequence
  Description of Artificial Sequence:  Hypothetical Probe Sequence
atcgagccaggaggtatctgcgaa

SEQ ID NO: 2032 - DNA, 24 bp, Artificial Sequence
  Description of Artificial Sequence:  Hypothetical Probe Sequence
atcgagcctccccgttttagtgcg

SEQ ID NO: 2033 - DNA, 24 bp, Artificial Sequence
  Description of Artificial Sequence:  Hypothetical Probe Sequence
atcgagccgaccttaggaccgagt

SEQ ID NO: 2034 - DNA, 24 bp, Artificial Sequence
  Description of Artificial Sequence:  Hypothetical Probe Sequence
aggatgatcgaaccattcccgctt

SEQ ID NO: 2035 - DNA, 24 bp, Artificial Sequence
  Description of Artificial Sequence:  Hypothetical Probe Sequence
aggattaggcaatcccgcaagatg

SEQ ID NO: 2036 - DNA, 24 bp, Artificial Sequence
  Description of Artificial Sequence:  Hypothetical Probe Sequence
aggaaatcgcaatctgacgggctt

SEQ ID NO: 2037 - DNA, 24 bp, Artificial Sequence
  Description of Artificial Sequence:  Hypothetical Probe Sequence
aggaaatcggactcgtcagcgctt

SEQ ID NO: 2038 - DNA, 24 bp, Artificial Sequence
  Description of Artificial Sequence:  Hypothetical Probe Sequence
aggaaaagccatccatgatgcacg

SEQ ID NO: 2039 - DNA, 24 bp, Artificial Sequence
  Description of Artificial Sequence:  Hypothetical Probe Sequence
aggaaaaggctttgcgcttgttga

SEQ ID NO: 2040 - DNA, 24 bp, Artificial Sequence
  Description of Artificial Sequence:  Hypothetical Probe Sequence
aggaaaagtccctgatgtgcgtgc

SEQ ID NO: 2041 - DNA, 24 bp, Artificial Sequence
  Description of Artificial Sequence:  Hypothetical Probe Sequence
aggaaaagcacgatcgaaaggcaa

SEQ ID NO: 2042 - DNA, 24 bp, Artificial Sequence
  Description of Artificial Sequence:  Hypothetical Probe Sequence
aggatctgcgttctgtcgtttgcg

SEQ ID NO: 2043 - DNA, 24 bp, Artificial Sequence
  Description of Artificial Sequence:  Hypothetical Probe Sequence
aggatctgcgaaacctcacgacgg

SEQ ID NO: 2044 - DNA, 24 bp, Artificial Sequence
  Description of Artificial Sequence:  Hypothetical Probe Sequence
aggatctgagccacggccatcgtt

SEQ ID NO: 2045 - DNA, 24 bp, Artificial Sequence
  Description of Artificial Sequence:  Hypothetical Probe Sequence
aggatgtccagctcgttgcgtgcg

SEQ ID NO: 2046 - DNA, 24 bp, Artificial Sequence
  Description of Artificial Sequence:  Hypothetical Probe Sequence
aggatcgtcgaaagcccttgcttg

SEQ ID NO: 2047 - DNA, 24 bp, Artificial Sequence
  Description of Artificial Sequence:  Hypothetical Probe Sequence
aggatcgtacggcagcgaccgatg

SEQ ID NO: 2048 - DNA, 24 bp, Artificial Sequence
  Description of Artificial Sequence:  Hypothetical Probe Sequence
aggacttggcttagccggacagtg

SEQ ID NO: 2049 - DNA, 24 bp, Artificial Sequence
  Description of Artificial Sequence:  Hypothetical Probe Sequence
aggacttgggtatgtcgtgccgtt

SEQ ID NO: 2050 - DNA, 24 bp, Artificial Sequence
  Description of Artificial Sequence:  Hypothetical Probe Sequence
aggacttggcaatgattcccggac

SEQ ID NO: 2051 - DNA, 24 bp, Artificial Sequence
  Description of Artificial Sequence:  Hypothetical Probe Sequence
aggacgttatcgatcgtcccgtgc

SEQ ID NO: 2052 - DNA, 24 bp, Artificial Sequence
  Description of Artificial Sequence:  Hypothetical Probe Sequence
aggacgttcagcgagttgcgccta

SEQ ID NO: 2053 - DNA, 24 bp, Artificial Sequence
  Description of Artificial Sequence:  Hypothetical Probe Sequence
aggacgttgtgcatcgcgttgacc

SEQ ID NO: 2054 - DNA, 24 bp, Artificial Sequence
  Description of Artificial Sequence:  Hypothetical Probe Sequence
aggacgttggacgtgctccctccc

SEQ ID NO: 2055 - DNA, 24 bp, Artificial Sequence
  Description of Artificial Sequence:  Hypothetical Probe Sequence
aggaccatgcaatgtcagccggac

SEQ ID NO: 2056 - DNA, 24 bp, Artificial Sequence
  Description of Artificial Sequence:  Hypothetical Probe Sequence
aggaccatagtggcaaggacacgg

SEQ ID NO: 2057 - DNA, 24 bp, Artificial Sequence
  Description of Artificial Sequence:  Hypothetical Probe Sequence
aggaccatcagcaaagccatgcaa

SEQ ID NO: 2058 - DNA, 24 bp, Artificial Sequence
  Description of Artificial Sequence:  Hypothetical Probe Sequence
aggaccatgtgctcccacggcgtt

SEQ ID NO: 2059 - DNA, 24 bp, Artificial Sequence
  Description of Artificial Sequence:  Hypothetical Probe Sequence
aggacgaacgttttagcagcgacc

SEQ ID NO: 2060 - DNA, 24 bp, Artificial Sequence
  Description of Artificial Sequence:  Hypothetical Probe Sequence
aggacgaaaccttctgccatgcaa

SEQ ID NO: 2061 - DNA, 24 bp, Artificial Sequence
  Description of Artificial Sequence:  Hypothetical Probe Sequence
aggacgaaacggggtaaaagccat

SEQ ID NO: 2062 - DNA, 24 bp, Artificial Sequence
  Description of Artificial Sequence:  Hypothetical Probe Sequence
aggagctttctgagcccacgatcg

SEQ ID NO: 2063 - DNA, 24 bp, Artificial Sequence
  Description of Artificial Sequence:  Hypothetical Probe Sequence
aggagcaaggaccgaaccattgcg

SEQ ID NO: 2064 - DNA, 24 bp, Artificial Sequence
  Description of Artificial Sequence:  Hypothetical Probe Sequence
aggagcaaacggacctcagcggta

SEQ ID NO: 2065 - DNA, 24 bp, Artificial Sequence
  Description of Artificial Sequence:  Hypothetical Probe Sequence
aggaagtgccatcgtttcccatcg

SEQ ID NO: 2066 - DNA, 24 bp, Artificial Sequence
  Description of Artificial Sequence:  Hypothetical Probe Sequence
aggaagtgcctacacgcacgagcc

SEQ ID NO: 2067 - DNA, 24 bp, Artificial Sequence
  Description of Artificial Sequence:  Hypothetical Probe Sequence
aggaagtgcagcatcgctcagcaa

SEQ ID NO: 2068 - DNA, 24 bp, Artificial Sequence
  Description of Artificial Sequence:  Hypothetical Probe Sequence
aggaagtgagcccctaagccacgg

SEQ ID NO: 2069 - DNA, 24 bp, Artificial Sequence
  Description of Artificial Sequence:  Hypothetical Probe Sequence
aggaacctcagcccatagccgctt

SEQ ID NO: 2070 - DNA, 24 bp, Artificial Sequence
  Description of Artificial Sequence:  Hypothetical Probe Sequence
aggaacctgaccgcttggacgtgc

SEQ ID NO: 2071 - DNA, 24 bp, Artificial Sequence
  Description of Artificial Sequence:  Hypothetical Probe Sequence
aggaatcgccatctgtgcttcgaa

SEQ ID NO: 2072 - DNA, 24 bp, Artificial Sequence
  Description of Artificial Sequence:  Hypothetical Probe Sequence
aggaatcgaccttcccgtgcgctt

SEQ ID NO: 2073 - DNA, 24 bp, Artificial Sequence
  Description of Artificial Sequence:  Hypothetical Probe Sequence
aggaatcgcagcggtagtgcccat

SEQ ID NO: 2074 - DNA, 24 bp, Artificial Sequence
  Description of Artificial Sequence:  Hypothetical Probe Sequence
aggaaggacacgatcgacggcagc

SEQ ID NO: 2075 - DNA, 24 bp, Artificial Sequence
  Description of Artificial Sequence:  Hypothetical Probe Sequence
aggagatggcaaatcgcacgccat

SEQ ID NO: 2076 - DNA, 24 bp, Artificial Sequence
  Description of Artificial Sequence:  Hypothetical Probe Sequence
aggatccccttggtctagccgcaa

SEQ ID NO: 2077 - DNA, 24 bp, Artificial Sequence
  Description of Artificial Sequence:  Hypothetical Probe Sequence
aggatcccgagttcgtgatggctt

SEQ ID NO: 2078 - DNA, 24 bp, Artificial Sequence
  Description of Artificial Sequence:  Hypothetical Probe Sequence
aggatgcgcgttcttgctgtggac

SEQ ID NO: 2079 - DNA, 24 bp, Artificial Sequence
  Description of Artificial Sequence:  Hypothetical Probe Sequence
aggatgcgagtgcgttgcaacacg

SEQ ID NO: 2080 - DNA, 24 bp, Artificial Sequence
  Description of Artificial Sequence:  Hypothetical Probe Sequence
aggatgcgtgcgacggtacacgtt

SEQ ID NO: 2081 - DNA, 24 bp, Artificial Sequence
  Description of Artificial Sequence:  Hypothetical Probe Sequence
aggatgcggtgctacacagcgctt

SEQ ID NO: 2082 - DNA, 24 bp, Artificial Sequence
  Description of Artificial Sequence:  Hypothetical Probe Sequence
aggacacgatacgatgcagctgcg

SEQ ID NO: 2083 - DNA, 24 bp, Artificial Sequence
  Description of Artificial Sequence:  Hypothetical Probe Sequence
aggacacgggtattgaacggacgg

SEQ ID NO: 2084 - DNA, 24 bp, Artificial Sequence
  Description of Artificial Sequence:  Hypothetical Probe Sequence
aggacacgacctagcctctgtgcg

SEQ ID NO: 2085 - DNA, 24 bp, Artificial Sequence
  Description of Artificial Sequence:  Hypothetical Probe Sequence
aggacacgcctaaaagggacgctt

SEQ ID NO: 2086 - DNA, 24 bp, Artificial Sequence
  Description of Artificial Sequence:  Hypothetical Probe Sequence
aggacacgggacgtcttgcgtcgt

SEQ ID NO: 2087 - DNA, 24 bp, Artificial Sequence
  Description of Artificial Sequence:  Hypothetical Probe Sequence
aggacagcatcggtgcagtgcacg

SEQ ID NO: 2088 - DNA, 24 bp, Artificial Sequence
  Description of Artificial Sequence:  Hypothetical Probe Sequence
aggacagcaggatgcggatgtccc

SEQ ID NO: 2089 - DNA, 24 bp, Artificial Sequence
  Description of Artificial Sequence:  Hypothetical Probe Sequence
aggacagccctatgtccagccgaa

SEQ ID NO: 2090 - DNA, 24 bp, Artificial Sequence
  Description of Artificial Sequence:  Hypothetical Probe Sequence
aggacagccacgttagtccccgaa

SEQ ID NO: 2091 - DNA, 24 bp, Artificial Sequence
  Description of Artificial Sequence:  Hypothetical Probe Sequence
aggagtgcatacgaccatcggcaa

SEQ ID NO: 2092 - DNA, 24 bp, Artificial Sequence
  Description of Artificial Sequence:  Hypothetical Probe Sequence
aggagtgcaaagtgcggtgcgacc

SEQ ID NO: 2093 - DNA, 24 bp, Artificial Sequence
  Description of Artificial Sequence:  Hypothetical Probe Sequence
aggagtgcgtctaaagcagcgtgc

SEQ ID NO: 2094 - DNA, 24 bp, Artificial Sequence
  Description of Artificial Sequence:  Hypothetical Probe Sequence
aggagtgccctacagcagtggtgc

SEQ ID NO: 2095 - DNA, 24 bp, Artificial Sequence
  Description of Artificial Sequence:  Hypothetical Probe Sequence
aggagtgcgacctcgttgtcggac

SEQ ID NO: 2096 - DNA, 24 bp, Artificial Sequence
  Description of Artificial Sequence:  Hypothetical Probe Sequence
aggaggaccttgtcccgcaaacgg

SEQ ID NO: 2097 - DNA, 24 bp, Artificial Sequence
  Description of Artificial Sequence:  Hypothetical Probe Sequence
aggaggacccatggactcccctca

SEQ ID NO: 2098 - DNA, 24 bp, Artificial Sequence
  Description of Artificial Sequence:  Hypothetical Probe Sequence
aggaggacgatgacctcacgcgtt

SEQ ID NO: 2099 - DNA, 24 bp, Artificial Sequence
  Description of Artificial Sequence:  Hypothetical Probe Sequence
aggaacggatcgcctaccatgcaa

SEQ ID NO: 2100 - DNA, 24 bp, Artificial Sequence
  Description of Artificial Sequence:  Hypothetical Probe Sequence
aggaacggaggacacgctgtgacc

SEQ ID NO: 2101 - DNA, 24 bp, Artificial Sequence
  Description of Artificial Sequence:  Hypothetical Probe Sequence
aggaacgggatggtctcagctccc

SEQ ID NO: 2102 - DNA, 24 bp, Artificial Sequence
  Description of Artificial Sequence:  Hypothetical Probe Sequence
aggaagccaaaggagttcccccat

SEQ ID NO: 2103 - DNA, 24 bp, Artificial Sequence
  Description of Artificial Sequence:  Hypothetical Probe Sequence
aggaagccctcaataccacgccat

SEQ ID NO: 2104 - DNA, 24 bp, Artificial Sequence
  Description of Artificial Sequence:  Hypothetical Probe Sequence
aggaagccagtgcagcccatccat

SEQ ID NO: 2105 - DNA, 24 bp, Artificial Sequence
  Description of Artificial Sequence:  Hypothetical Probe Sequence
aggaagcccacggcttttgacagc

SEQ ID NO: 2106 - DNA, 24 bp, Artificial Sequence
  Description of Artificial Sequence:  Hypothetical Probe Sequence
aggaagcccagccacgctgtgagt

SEQ ID NO: 2107 - DNA, 24 bp, Artificial Sequence
  Description of Artificial Sequence:  Hypothetical Probe Sequence
aggaagccgtgctgtcctcacacg

SEQ ID NO: 2108 - DNA, 24 bp, Artificial Sequence
  Description of Artificial Sequence:  Hypothetical Probe Sequence
cctattgatgcggcaatcgtcgtt

SEQ ID NO: 2109 - DNA, 24 bp, Artificial Sequence
  Description of Artificial Sequence:  Hypothetical Probe Sequence
cctatgtcgcaatgtcgtgcgctt

SEQ ID NO: 2110 - DNA, 24 bp, Artificial Sequence
  Description of Artificial Sequence:  Hypothetical Probe Sequence
cctatgtcacgggaccgcaatgcg

SEQ ID NO: 2111 - DNA, 24 bp, Artificial Sequence
  Description of Artificial Sequence:  Hypothetical Probe Sequence
cctatcgttcgttgtctgcgcacg

SEQ ID NO: 2112 - DNA, 24 bp, Artificial Sequence
  Description of Artificial Sequence:  Hypothetical Probe Sequence
cctatcgtcacggtgccagctgcg

SEQ ID NO: 2113 - DNA, 24 bp, Artificial Sequence
  Description of Artificial Sequence:  Hypothetical Probe Sequence
cctacgttgaccgaccggactgcg

SEQ ID NO: 2114 - DNA, 24 bp, Artificial Sequence
  Description of Artificial Sequence:  Hypothetical Probe Sequence
cctactgttgcgcacgacgggacc

SEQ ID NO: 2115 - DNA, 24 bp, Artificial Sequence
  Description of Artificial Sequence:  Hypothetical Probe Sequence
cctagcttgacctcccgtgccacg

SEQ ID NO: 2116 - DNA, 24 bp, Artificial Sequence
  Description of Artificial Sequence:  Hypothetical Probe Sequence
cctagcaagcaacacgcctacacg

SEQ ID NO: 2117 - DNA, 24 bp, Artificial Sequence
  Description of Artificial Sequence:  Hypothetical Probe Sequence
cctaatcgccatagtgtccccacg

SEQ ID NO: 2118 - DNA, 24 bp, Artificial Sequence
  Description of Artificial Sequence:  Hypothetical Probe Sequence
cctatcccttgaagccacggctgt

SEQ ID NO: 2119 - DNA, 24 bp, Artificial Sequence
  Description of Artificial Sequence:  Hypothetical Probe Sequence
cctatcccctcagaccacggcgaa

SEQ ID NO: 2120 - DNA, 24 bp, Artificial Sequence
  Description of Artificial Sequence:  Hypothetical Probe Sequence
cctatccccacgtgatagccggta

SEQ ID NO: 2121 - DNA, 24 bp, Artificial Sequence
  Description of Artificial Sequence:  Hypothetical Probe Sequence
cctacacgtcgtagcccacgcgtt

SEQ ID NO: 2122 - DNA, 24 bp, Artificial Sequence
  Description of Artificial Sequence:  Hypothetical Probe Sequence
cctacacgctgtcgttgtgcgtgc

SEQ ID NO: 2123 - DNA, 24 bp, Artificial Sequence
  Description of Artificial Sequence:  Hypothetical Probe Sequence
cctacacgcagcagtgtgcgacct

SEQ ID NO: 2124 - DNA, 24 bp, Artificial Sequence
  Description of Artificial Sequence:  Hypothetical Probe Sequence
cctacagcgtcttcgtcagctgcg

SEQ ID NO: 2125 - DNA, 24 bp, Artificial Sequence
  Description of Artificial Sequence:  Hypothetical Probe Sequence
cctacagcgagtcacggcaaagcc

SEQ ID NO: 2126 - DNA, 24 bp, Artificial Sequence
  Description of Artificial Sequence:  Hypothetical Probe Sequence
cctagacccgaaccatccatacgg

SEQ ID NO: 2127 - DNA, 24 bp, Artificial Sequence
  Description of Artificial Sequence:  Hypothetical Probe Sequence
cctagtgcgtctcgttacgggacc

SEQ ID NO: 2128 - DNA, 24 bp, Artificial Sequence
  Description of Artificial Sequence:  Hypothetical Probe Sequence
cctagtgcacggttgagcaaatcg

SEQ ID NO: 2129 - DNA, 24 bp, Artificial Sequence
  Description of Artificial Sequence:  Hypothetical Probe Sequence
cctaggaccacgcagctcgtgcaa

SEQ ID NO: 2130 - DNA, 24 bp, Artificial Sequence
  Description of Artificial Sequence:  Hypothetical Probe Sequence
cctaagccgagtagtggtgcgacc

SEQ ID NO: 2131 - DNA, 24 bp, Artificial Sequence
  Description of Artificial Sequence:  Hypothetical Probe Sequence
cctaagccacctcttgtccctgcg

SEQ ID NO: 2132 - DNA, 24 bp, Artificial Sequence
  Description of Artificial Sequence:  Hypothetical Probe Sequence
gatgttgaagccgtgcgtgcggta

SEQ ID NO: 2133 - DNA, 24 bp, Artificial Sequence
  Description of Artificial Sequence:  Hypothetical Probe Sequence
gatgaatcgtgcacggcgtttccc

SEQ ID NO: 2134 - DNA, 24 bp, Artificial Sequence
  Description of Artificial Sequence:  Hypothetical Probe Sequence
gatgaatcacggtcgttccccacg

SEQ ID NO: 2135 - DNA, 24 bp, Artificial Sequence
  Description of Artificial Sequence:  Hypothetical Probe Sequence
gatgaaagccatcagcggacgtgc

SEQ ID NO: 2136 - DNA, 24 bp, Artificial Sequence
  Description of Artificial Sequence:  Hypothetical Probe Sequence
gatgaaagcgaaagccccatcgtt

SEQ ID NO: 2137 - DNA, 24 bp, Artificial Sequence
  Description of Artificial Sequence:  Hypothetical Probe Sequence
gatgaaagcacgcagctgcgtgcg

SEQ ID NO: 2138 - DNA, 24 bp, Artificial Sequence
  Description of Artificial Sequence:  Hypothetical Probe Sequence
gatgcttgcgttccatgtgcacct

SEQ ID NO: 2139 - DNA, 24 bp, Artificial Sequence
  Description of Artificial Sequence:  Hypothetical Probe Sequence
gatgcgtttgtccgaaagccacgg

SEQ ID NO: 2140 - DNA, 24 bp, Artificial Sequence
  Description of Artificial Sequence:  Hypothetical Probe Sequence
gatgcgttggacagcccctacagc

SEQ ID NO: 2141 - DNA, 24 bp, Artificial Sequence
  Description of Artificial Sequence:  Hypothetical Probe Sequence
gatgctcacacgcgaacacggtgc

SEQ ID NO: 2142 - DNA, 24 bp, Artificial Sequence
  Description of Artificial Sequence:  Hypothetical Probe Sequence
gatgctgtcgaacctatgcggtgc

SEQ ID NO: 2143 - DNA, 24 bp, Artificial Sequence
  Description of Artificial Sequence:  Hypothetical Probe Sequence
gatgctgtcagccacggcttgtgc

SEQ ID NO: 2144 - DNA, 24 bp, Artificial Sequence
  Description of Artificial Sequence:  Hypothetical Probe Sequence
gatgctgtagccacgggcaacacg

SEQ ID NO: 2145 - DNA, 24 bp, Artificial Sequence
  Description of Artificial Sequence:  Hypothetical Probe Sequence
gatgccatcgtttcgtgcttggac

SEQ ID NO: 2146 - DNA, 24 bp, Artificial Sequence
  Description of Artificial Sequence:  Hypothetical Probe Sequence
gatgccatccatcagccgaaacct

SEQ ID NO: 2147 - DNA, 24 bp, Artificial Sequence
  Description of Artificial Sequence:  Hypothetical Probe Sequence
gatgccataggaggaccagccgaa

SEQ ID NO: 2148 - DNA, 24 bp, Artificial Sequence
  Description of Artificial Sequence:  Hypothetical Probe Sequence
gatgccatcctacgaaagccgacc

SEQ ID NO: 2149 - DNA, 24 bp, Artificial Sequence
  Description of Artificial Sequence:  Hypothetical Probe Sequence
gatgccattcccggtacagcccat

SEQ ID NO: 2150 - DNA, 24 bp, Artificial Sequence
  Description of Artificial Sequence:  Hypothetical Probe Sequence
gatgcgaactcatgcgggactccc

SEQ ID NO: 2151 - DNA, 24 bp, Artificial Sequence
  Description of Artificial Sequence:  Hypothetical Probe Sequence
gatgcgaaatcgcctacagcgctt

SEQ ID NO: 2152 - DNA, 24 bp, Artificial Sequence
  Description of Artificial Sequence:  Hypothetical Probe Sequence
gatgcgaaacgggcaatgtccttg

SEQ ID NO: 2153 - DNA, 24 bp, Artificial Sequence
  Description of Artificial Sequence:  Hypothetical Probe Sequence
gatgcgaaagccgcttgcaacttg

SEQ ID NO: 2154 - DNA, 24 bp, Artificial Sequence
  Description of Artificial Sequence:  Hypothetical Probe Sequence
gatggcttcttgcacggaccgtgc

SEQ ID NO: 2155 - DNA, 24 bp, Artificial Sequence
  Description of Artificial Sequence:  Hypothetical Probe Sequence
gatggcttgcaaaggatcgtgcaa

SEQ ID NO: 2156 - DNA, 24 bp, Artificial Sequence
  Description of Artificial Sequence:  Hypothetical Probe Sequence
gatggcttgaccgtctcagctgcg

SEQ ID NO: 2157 - DNA, 24 bp, Artificial Sequence
  Description of Artificial Sequence:  Hypothetical Probe Sequence
gatgggtatgcgatcgcacgaatc

SEQ ID NO: 2158 - DNA, 24 bp, Artificial Sequence
  Description of Artificial Sequence:  Hypothetical Probe Sequence
gatgggtagtgccacgtgcgcacg

SEQ ID NO: 2159 - DNA, 24 bp, Artificial Sequence
  Description of Artificial Sequence:  Hypothetical Probe Sequence
gatggagttcccggtagtgcgcaa

SEQ ID NO: 2160 - DNA, 24 bp, Artificial Sequence
  Description of Artificial Sequence:  Hypothetical Probe Sequence
gatggcaatctgcgaatcccagcc

SEQ ID NO: 2161 - DNA, 24 bp, Artificial Sequence
  Description of Artificial Sequence:  Hypothetical Probe Sequence
gatggcaacgttatacgcaatgcg

SEQ ID NO: 2162 - DNA, 24 bp, Artificial Sequence
  Description of Artificial Sequence:  Hypothetical Probe Sequence
gatggcaagcttcagccctagtgc

SEQ ID NO: 2163 - DNA, 24 bp, Artificial Sequence
  Description of Artificial Sequence:  Hypothetical Probe Sequence
gatggcaaacctaaagcagccgaa

SEQ ID NO: 2164 - DNA, 24 bp, Artificial Sequence
  Description of Artificial Sequence:  Hypothetical Probe Sequence
gatggcaagatggaccagcccgaa

SEQ ID NO: 2165 - DNA, 24 bp, Artificial Sequence
  Description of Artificial Sequence:  Hypothetical Probe Sequence
gatgagtggcaacgttcgtttccc

SEQ ID NO: 2166 - DNA, 24 bp, Artificial Sequence
  Description of Artificial Sequence:  Hypothetical Probe Sequence
gatgaccttgcgcgttgcttcgtt

SEQ ID NO: 2167 - DNA, 24 bp, Artificial Sequence
  Description of Artificial Sequence:  Hypothetical Probe Sequence
gatgatcgcgttccatgcttacgg

SEQ ID NO: 2168 - DNA, 24 bp, Artificial Sequence
  Description of Artificial Sequence:  Hypothetical Probe Sequence
gatgatcgccattgtccacgctca

SEQ ID NO: 2169 - DNA, 24 bp, Artificial Sequence
  Description of Artificial Sequence:  Hypothetical Probe Sequence
gatgatcggcttccatggactgcg

SEQ ID NO: 2170 - DNA, 24 bp, Artificial Sequence
  Description of Artificial Sequence:  Hypothetical Probe Sequence
gatgatcgcacggatgcgttcacg

SEQ ID NO: 2171 - DNA, 24 bp, Artificial Sequence
  Description of Artificial Sequence:  Hypothetical Probe Sequence
gatgcctaagccggtagtgcggac

SEQ ID NO: 2172 - DNA, 24 bp, Artificial Sequence
  Description of Artificial Sequence:  Hypothetical Probe Sequence
gatggatgctcagacccgttcgaa

SEQ ID NO: 2173 - DNA, 24 bp, Artificial Sequence
  Description of Artificial Sequence:  Hypothetical Probe Sequence
gatggatgcctatgcgagcctgcg

SEQ ID NO: 2174 - DNA, 24 bp, Artificial Sequence
  Description of Artificial Sequence:  Hypothetical Probe Sequence
gatggatggtgctgatcacgcgaa

SEQ ID NO: 2175 - DNA, 24 bp, Artificial Sequence
  Description of Artificial Sequence:  Hypothetical Probe Sequence
gatggatgagccaatccagctccc

SEQ ID NO: 2176 - DNA, 24 bp, Artificial Sequence
  Description of Artificial Sequence:  Hypothetical Probe Sequence
gatgtcccgcttaatccttgcgtt

SEQ ID NO: 2177 - DNA, 24 bp, Artificial Sequence
  Description of Artificial Sequence:  Hypothetical Probe Sequence
gatgtcccgtctcgttgaccccat

SEQ ID NO: 2178 - DNA, 24 bp, Artificial Sequence
  Description of Artificial Sequence:  Hypothetical Probe Sequence
gatgtccccagcgcttcacggtct

SEQ ID NO: 2179 - DNA, 24 bp, Artificial Sequence
  Description of Artificial Sequence:  Hypothetical Probe Sequence
gatgtcccgaccatactcccgcaa

SEQ ID NO: 2180 - DNA, 24 bp, Artificial Sequence
  Description of Artificial Sequence:  Hypothetical Probe Sequence
gatgtgcgttagcagcgatgatcg

SEQ ID NO: 2181 - DNA, 24 bp, Artificial Sequence
  Description of Artificial Sequence:  Hypothetical Probe Sequence
gatgtgcgggtaatcggcttgatg

SEQ ID NO: 2182 - DNA, 24 bp, Artificial Sequence
  Description of Artificial Sequence:  Hypothetical Probe Sequence
gatgtgcgcacgcgaatcgtagga

SEQ ID NO: 2183 - DNA, 24 bp, Artificial Sequence
  Description of Artificial Sequence:  Hypothetical Probe Sequence
gatgtgcgcagcgcaaatcgacct

SEQ ID NO: 2184 - DNA, 24 bp, Artificial Sequence
  Description of Artificial Sequence:  Hypothetical Probe Sequence
gatgcacgtgtcgtgcagccggac

SEQ ID NO: 2185 - DNA, 24 bp, Artificial Sequence
  Description of Artificial Sequence:  Hypothetical Probe Sequence
gatgcacgccatcgttcgttctca

SEQ ID NO: 2186 - DNA, 24 bp, Artificial Sequence
  Description of Artificial Sequence:  Hypothetical Probe Sequence
gatgcacgagtgacggatcggtgc

SEQ ID NO: 2187 - DNA, 24 bp, Artificial Sequence
  Description of Artificial Sequence:  Hypothetical Probe Sequence
gatgcacgtgcggtctgacccagc

SEQ ID NO: 2188 - DNA, 24 bp, Artificial Sequence
  Description of Artificial Sequence:  Hypothetical Probe Sequence
gatgcacgcacgcttgatcgggta

SEQ ID NO: 2189 - DNA, 24 bp, Artificial Sequence
  Description of Artificial Sequence:  Hypothetical Probe Sequence
gatgcacgagccgaccaatcacgg

SEQ ID NO: 2190 - DNA, 24 bp, Artificial Sequence
  Description of Artificial Sequence:  Hypothetical Probe Sequence
gatgcagctgattgcgatcgggac

SEQ ID NO: 2191 - DNA, 24 bp, Artificial Sequence
  Description of Artificial Sequence:  Hypothetical Probe Sequence
gatgcagctcgtcacgtcccatcg

SEQ ID NO: 2192 - DNA, 24 bp, Artificial Sequence
  Description of Artificial Sequence:  Hypothetical Probe Sequence
gatgcagccttgatcgcgaactca

SEQ ID NO: 2193 - DNA, 24 bp, Artificial Sequence
  Description of Artificial Sequence:  Hypothetical Probe Sequence
gatgcagcctcatgatgaccgctt

SEQ ID NO: 2194 - DNA, 24 bp, Artificial Sequence
  Description of Artificial Sequence:  Hypothetical Probe Sequence
gatgcagcggtaggtaacgggatg

SEQ ID NO: 2195 - DNA, 24 bp, Artificial Sequence
  Description of Artificial Sequence:  Hypothetical Probe Sequence
gatgcagcgtgcgcttgtctcacg

SEQ ID NO: 2196 - DNA, 24 bp, Artificial Sequence
  Description of Artificial Sequence:  Hypothetical Probe Sequence
gatgcagcagccctcatcccgagt

SEQ ID NO: 2197 - DNA, 24 bp, Artificial Sequence
  Description of Artificial Sequence:  Hypothetical Probe Sequence
gatggacccgttggacaaagcgaa

SEQ ID NO: 2198 - DNA, 24 bp, Artificial Sequence
  Description of Artificial Sequence:  Hypothetical Probe Sequence
gatggacccacgacggggtaggta

SEQ ID NO: 2199 - DNA, 24 bp, Artificial Sequence
  Description of Artificial Sequence:  Hypothetical Probe Sequence
gatgacggttgagctttgcggcaa

SEQ ID NO: 2200 - DNA, 24 bp, Artificial Sequence
  Description of Artificial Sequence:  Hypothetical Probe Sequence
gatgacggggtagacccgaagcaa

SEQ ID NO: 2201 - DNA, 24 bp, Artificial Sequence
  Description of Artificial Sequence:  Hypothetical Probe Sequence
gatgagccctcactcaagcctgcg

SEQ ID NO: 2202 - DNA, 24 bp, Artificial Sequence
  Description of Artificial Sequence:  Hypothetical Probe Sequence
gatgagccgtctacggcagcaatc

SEQ ID NO: 2203 - DNA, 24 bp, Artificial Sequence
  Description of Artificial Sequence:  Hypothetical Probe Sequence
gatgagccatcgtcgtccatgcaa

SEQ ID NO: 2204 - DNA, 24 bp, Artificial Sequence
  Description of Artificial Sequence:  Hypothetical Probe Sequence
gatgagcccagcatacgcaacgtt

SEQ ID NO: 2205 - DNA, 24 bp, Artificial Sequence
  Description of Artificial Sequence:  Hypothetical Probe Sequence
tcccttgaaatctgcgagcccgtt

SEQ ID NO: 2206 - DNA, 24 bp, Artificial Sequence
  Description of Artificial Sequence:  Hypothetical Probe Sequence
tcccttgaaggaagcccttgtccc

SEQ ID NO: 2207 - DNA, 24 bp, Artificial Sequence
  Description of Artificial Sequence:  Hypothetical Probe Sequence
tcccttgatgcgttagggtatgcg

SEQ ID NO: 2208 - DNA, 24 bp, Artificial Sequence
  Description of Artificial Sequence:  Hypothetical Probe Sequence
tcccttgacagcaaagatcgcacg

SEQ ID NO: 2209 - DNA, 24 bp, Artificial Sequence
  Description of Artificial Sequence:  Hypothetical Probe Sequence
tcccttgaggaccacggatgcacg

SEQ ID NO: 2210 - DNA, 24 bp, Artificial Sequence
  Description of Artificial Sequence:  Hypothetical Probe Sequence
tccctgattctgggaccagcagcc

SEQ ID NO: 2211 - DNA, 24 bp, Artificial Sequence
  Description of Artificial Sequence:  Hypothetical Probe Sequence
tccctgattcgtaatcacggcacg

SEQ ID NO: 2212 - DNA, 24 bp, Artificial Sequence
  Description of Artificial Sequence:  Hypothetical Probe Sequence
tccctgatcgaattgaagccagcc

SEQ ID NO: 2213 - DNA, 24 bp, Artificial Sequence
  Description of Artificial Sequence:  Hypothetical Probe Sequence
tccctgattgcgaggacctatccc

SEQ ID NO: 2214 - DNA, 24 bp, Artificial Sequence
  Description of Artificial Sequence:  Hypothetical Probe Sequence
tccctgatgacctgtcacggacgg

SEQ ID NO: 2215 - DNA, 24 bp, Artificial Sequence
  Description of Artificial Sequence:  Hypothetical Probe Sequence
tcccttagctgtatcgtgcgcgaa

SEQ ID NO: 2216 - DNA, 24 bp, Artificial Sequence
  Description of Artificial Sequence:  Hypothetical Probe Sequence
tcccttaggcaagcttgcaaggac

SEQ ID NO: 2217 - DNA, 24 bp, Artificial Sequence
  Description of Artificial Sequence:  Hypothetical Probe Sequence
tcccttagaggaaatctgcgtgcg

SEQ ID NO: 2218 - DNA, 24 bp, Artificial Sequence
  Description of Artificial Sequence:  Hypothetical Probe Sequence
tcccttagcacgcttgaggatccc

SEQ ID NO: 2219 - DNA, 24 bp, Artificial Sequence
  Description of Artificial Sequence:  Hypothetical Probe Sequence
tcccaatcctgtggactcccgctt

SEQ ID NO: 2220 - DNA, 24 bp, Artificial Sequence
  Description of Artificial Sequence:  Hypothetical Probe Sequence
tcccaatcgcttcctagaccccat

SEQ ID NO: 2221 - DNA, 24 bp, Artificial Sequence
  Description of Artificial Sequence:  Hypothetical Probe Sequence
tcccaatcgagtacctgaccgacc

SEQ ID NO: 2222 - DNA, 24 bp, Artificial Sequence
  Description of Artificial Sequence:  Hypothetical Probe Sequence
tcccaatcagtggaccgaccagcc

SEQ ID NO: 2223 - DNA, 24 bp, Artificial Sequence
  Description of Artificial Sequence:  Hypothetical Probe Sequence
tcccaatcacctcttgagcccgtt

SEQ ID NO: 2224 - DNA, 24 bp, Artificial Sequence
  Description of Artificial Sequence:  Hypothetical Probe Sequence
tcccaatctcccagtgtgcgagga

SEQ ID NO: 2225 - DNA, 24 bp, Artificial Sequence
  Description of Artificial Sequence:  Hypothetical Probe Sequence
tcccaatcgacctctgcacgaaag

SEQ ID NO: 2226 - DNA, 24 bp, Artificial Sequence
  Description of Artificial Sequence:  Hypothetical Probe Sequence
tcccaatcagccgatgcgttagga

SEQ ID NO: 2227 - DNA, 24 bp, Artificial Sequence
  Description of Artificial Sequence:  Hypothetical Probe Sequence
tcccataccttggtgcacgggatg

SEQ ID NO: 2228 - DNA, 24 bp, Artificial Sequence
  Description of Artificial Sequence:  Hypothetical Probe Sequence
tcccatacccatcagccagcgagt

SEQ ID NO: 2229 - DNA, 24 bp, Artificial Sequence
  Description of Artificial Sequence:  Hypothetical Probe Sequence
tcccataccgaaatacgtgcggac

SEQ ID NO: 2230 - DNA, 24 bp, Artificial Sequence
  Description of Artificial Sequence:  Hypothetical Probe Sequence
tcccatacgtgccgaactcaagcc

SEQ ID NO: 2231 - DNA, 24 bp, Artificial Sequence
  Description of Artificial Sequence:  Hypothetical Probe Sequence
tcccaaagcgtttcgtcgttccat

SEQ ID NO: 2232 - DNA, 24 bp, Artificial Sequence
  Description of Artificial Sequence:  Hypothetical Probe Sequence
tcccaaagggtaccatcgttcacg

SEQ ID NO: 2233 - DNA, 24 bp, Artificial Sequence
  Description of Artificial Sequence:  Hypothetical Probe Sequence
tcccaaaggtctcgttcacggcaa

SEQ ID NO: 2234 - DNA, 24 bp, Artificial Sequence
  Description of Artificial Sequence:  Hypothetical Probe Sequence
tcccaaagacctcacgatcgcgtt

SEQ ID NO: 2235 - DNA, 24 bp, Artificial Sequence
  Description of Artificial Sequence:  Hypothetical Probe Sequence
tcccaaagatcgcgaattagcgaa

SEQ ID NO: 2236 - DNA, 24 bp, Artificial Sequence
  Description of Artificial Sequence:  Hypothetical Probe Sequence
tcccaaaggatgacctcttgcgaa

SEQ ID NO: 2237 - DNA, 24 bp, Artificial Sequence
  Description of Artificial Sequence:  Hypothetical Probe Sequence
tcccaaagtgcgtgatccattcgt

SEQ ID NO: 2238 - DNA, 24 bp, Artificial Sequence
  Description of Artificial Sequence:  Hypothetical Probe Sequence
tcccaaagcagcaatctgtcgtgc

SEQ ID NO: 2239 - DNA, 24 bp, Artificial Sequence
  Description of Artificial Sequence:  Hypothetical Probe Sequence
tcccaaaggacctcgttcgtagga

SEQ ID NO: 2240 - DNA, 24 bp, Artificial Sequence
  Description of Artificial Sequence:  Hypothetical Probe Sequence
tcccaaagagcccttgacggccta

SEQ ID NO: 2241 - DNA, 24 bp, Artificial Sequence
  Description of Artificial Sequence:  Hypothetical Probe Sequence
tccctctgcgtttccctcgttctg

SEQ ID NO: 2242 - DNA, 24 bp, Artificial Sequence
  Description of Artificial Sequence:  Hypothetical Probe Sequence
tccctctgctcacctaacggcgtt

SEQ ID NO: 2243 - DNA, 24 bp, Artificial Sequence
  Description of Artificial Sequence:  Hypothetical Probe Sequence
tccctctggtctgacccgaatccc

SEQ ID NO: 2244 - DNA, 24 bp, Artificial Sequence
  Description of Artificial Sequence:  Hypothetical Probe Sequence
tccctctgatcgcagcgcaagacc

SEQ ID NO: 2245 - DNA, 24 bp, Artificial Sequence
  Description of Artificial Sequence:  Hypothetical Probe Sequence
tccctctgaggacgttctgttgcg

SEQ ID NO: 2246 - DNA, 24 bp, Artificial Sequence
  Description of Artificial Sequence:  Hypothetical Probe Sequence
tccctctgtcccttgatgtcgcaa

SEQ ID NO: 2247 - DNA, 24 bp, Artificial Sequence
  Description of Artificial Sequence:  Hypothetical Probe Sequence
tccctctgggactgtcgaccatcg

SEQ ID NO: 2248 - DNA, 24 bp, Artificial Sequence
  Description of Artificial Sequence:  Hypothetical Probe Sequence
tccctgtccttgcgtttctgacgg

SEQ ID NO: 2249 - DNA, 24 bp, Artificial Sequence
  Description of Artificial Sequence:  Hypothetical Probe Sequence
tccctgtcatcgaatcgtgcggac

SEQ ID NO: 2250 - DNA, 24 bp, Artificial Sequence
  Description of Artificial Sequence:  Hypothetical Probe Sequence
tccctgtcaggatgtcgacctgcg

SEQ ID NO: 2251 - DNA, 24 bp, Artificial Sequence
  Description of Artificial Sequence:  Hypothetical Probe Sequence
tccctgtcggactacatccccgtt

SEQ ID NO: 2252 - DNA, 24 bp, Artificial Sequence
  Description of Artificial Sequence:  Hypothetical Probe Sequence
tccctcgttgtcacctcagcagcc

SEQ ID NO: 2253 - DNA, 24 bp, Artificial Sequence
  Description of Artificial Sequence:  Hypothetical Probe Sequence
tccctcgtctcagacccagcgctt

SEQ ID NO: 2254 - DNA, 24 bp, Artificial Sequence
  Description of Artificial Sequence:  Hypothetical Probe Sequence
tccctcgtggtatacatgcgcagc

SEQ ID NO: 2255 - DNA, 24 bp, Artificial Sequence
  Description of Artificial Sequence:  Hypothetical Probe Sequence
tccctcgtgtcttgtcagcctccc

SEQ ID NO: 2256 - DNA, 24 bp, Artificial Sequence
  Description of Artificial Sequence:  Hypothetical Probe Sequence
tccctcgtgcaaagtggtgcagga

SEQ ID NO: 2257 - DNA, 24 bp, Artificial Sequence
  Description of Artificial Sequence:  Hypothetical Probe Sequence
tccctcgtacctcctagtgctgcg

SEQ ID NO: 2258 - DNA, 24 bp, Artificial Sequence
  Description of Artificial Sequence:  Hypothetical Probe Sequence
tccctcgtgatgcacgatcgagga

SEQ ID NO: 2259 - DNA, 24 bp, Artificial Sequence
  Description of Artificial Sequence:  Hypothetical Probe Sequence
tccctcgttgcgccataggagctt

SEQ ID NO: 2260 - DNA, 24 bp, Artificial Sequence
  Description of Artificial Sequence:  Hypothetical Probe Sequence
tccctcgtgacctcgtgcaaaatc

SEQ ID NO: 2261 - DNA, 24 bp, Artificial Sequence
  Description of Artificial Sequence:  Hypothetical Probe Sequence
tccctcgtgtgcttagccatgctt

SEQ ID NO: 2262 - DNA, 24 bp, Artificial Sequence
  Description of Artificial Sequence:  Hypothetical Probe Sequence
tccctcgtggacgcttagtgcgaa

SEQ ID NO: 2263 - DNA, 24 bp, Artificial Sequence
  Description of Artificial Sequence:  Hypothetical Probe Sequence
tccccttgtgattcgttgcgacct

SEQ ID NO: 2264 - DNA, 24 bp, Artificial Sequence
  Description of Artificial Sequence:  Hypothetical Probe Sequence
tccccttgaaagggtaaccttgcg

SEQ ID NO: 2265 - DNA, 24 bp, Artificial Sequence
  Description of Artificial Sequence:  Hypothetical Probe Sequence
tccccttgtctgacctagcccgaa

SEQ ID NO: 2266 - DNA, 24 bp, Artificial Sequence
  Description of Artificial Sequence:  Hypothetical Probe Sequence
tccccttgctcaggactctggcaa

SEQ ID NO: 2267 - DNA, 24 bp, Artificial Sequence
  Description of Artificial Sequence:  Hypothetical Probe Sequence
tccccttgggtaagtgtgcggatg

SEQ ID NO: 2268 - DNA, 24 bp, Artificial Sequence
  Description of Artificial Sequence:  Hypothetical Probe Sequence
tccccttgatcgtctgtccccttg

SEQ ID NO: 2269 - DNA, 24 bp, Artificial Sequence
  Description of Artificial Sequence:  Hypothetical Probe Sequence
tccccttgagccaggattgatccc

SEQ ID NO: 2270 - DNA, 24 bp, Artificial Sequence
  Description of Artificial Sequence:  Hypothetical Probe Sequence
tccccgtttgatatcgtgattccc

SEQ ID NO: 2271 - DNA, 24 bp, Artificial Sequence
  Description of Artificial Sequence:  Hypothetical Probe Sequence
tccccgttatacgtgcgatggctt

SEQ ID NO: 2272 - DNA, 24 bp, Artificial Sequence
  Description of Artificial Sequence:  Hypothetical Probe Sequence
tccccgtttacattgacacgccat

SEQ ID NO: 2273 - DNA, 24 bp, Artificial Sequence
  Description of Artificial Sequence:  Hypothetical Probe Sequence
tccccgtttgtctgtcgaccgagt

SEQ ID NO: 2274 - DNA, 24 bp, Artificial Sequence
  Description of Artificial Sequence:  Hypothetical Probe Sequence
tccccgtttcgtcagcatcgaatc

SEQ ID NO: 2275 - DNA, 24 bp, Artificial Sequence
  Description of Artificial Sequence:  Hypothetical Probe Sequence
tccccgttcttggagtggtatgcg

SEQ ID NO: 2276 - DNA, 24 bp, Artificial Sequence
  Description of Artificial Sequence:  Hypothetical Probe Sequence
tccccgttctcaggtacacgctca

SEQ ID NO: 2277 - DNA, 24 bp, Artificial Sequence
  Description of Artificial Sequence:  Hypothetical Probe Sequence
tccccgttccatcacggatgagtg

SEQ ID NO: 2278 - DNA, 24 bp, Artificial Sequence
  Description of Artificial Sequence:  Hypothetical Probe Sequence
tccccgttgctttcccctgtagtg

SEQ ID NO: 2279 - DNA, 24 bp, Artificial Sequence
  Description of Artificial Sequence:  Hypothetical Probe Sequence
tccccgttgcaatctgacctcgaa

SEQ ID NO: 2280 - DNA, 24 bp, Artificial Sequence
  Description of Artificial Sequence:  Hypothetical Probe Sequence
tccccgttaccttgatacgggctt

SEQ ID NO: 2281 - DNA, 24 bp, Artificial Sequence
  Description of Artificial Sequence:  Hypothetical Probe Sequence
tccccgttatcgcctatcccagtg

SEQ ID NO: 2282 - DNA, 24 bp, Artificial Sequence
  Description of Artificial Sequence:  Hypothetical Probe Sequence
tccccgtttgcgtcgtaggacagc

SEQ ID NO: 2283 - DNA, 24 bp, Artificial Sequence
  Description of Artificial Sequence:  Hypothetical Probe Sequence
tccccgttgtgcagtgcgttctca

SEQ ID NO: 2284 - DNA, 24 bp, Artificial Sequence
  Description of Artificial Sequence:  Hypothetical Probe Sequence
tcccctcatgattgcgacgggctt

SEQ ID NO: 2285 - DNA, 24 bp, Artificial Sequence
  Description of Artificial Sequence:  Hypothetical Probe Sequence
tcccctcattagcttgtgcgcgtt

SEQ ID NO: 2286 - DNA, 24 bp, Artificial Sequence
  Description of Artificial Sequence:  Hypothetical Probe Sequence
tcccctcatctggcttttagcgaa

SEQ ID NO: 2287 - DNA, 24 bp, Artificial Sequence
  Description of Artificial Sequence:  Hypothetical Probe Sequence
tcccctcaccatcctaagccagtg

SEQ ID NO: 2288 - DNA, 24 bp, Artificial Sequence
  Description of Artificial Sequence:  Hypothetical Probe Sequence
tcccctcagcttaggacgaacagc

SEQ ID NO: 2289 - DNA, 24 bp, Artificial Sequence
  Description of Artificial Sequence:  Hypothetical Probe Sequence
tcccctcaacctcctacacgtccc

SEQ ID NO: 2290 - DNA, 24 bp, Artificial Sequence
  Description of Artificial Sequence:  Hypothetical Probe Sequence
tcccctcacacgatcgtcgtgacc

SEQ ID NO: 2291 - DNA, 24 bp, Artificial Sequence
  Description of Artificial Sequence:  Hypothetical Probe Sequence
tcccctcacagcctgttcccacct

SEQ ID NO: 2292 - DNA, 24 bp, Artificial Sequence
  Description of Artificial Sequence:  Hypothetical Probe Sequence
tcccctgttgatgcttgaccgtgc

SEQ ID NO: 2293 - DNA, 24 bp, Artificial Sequence
  Description of Artificial Sequence:  Hypothetical Probe Sequence
tcccctgttctgccatgatgtgcg

SEQ ID NO: 2294 - DNA, 24 bp, Artificial Sequence
  Description of Artificial Sequence:  Hypothetical Probe Sequence
tcccctgttgtcgcaagaccgctt

SEQ ID NO: 2295 - DNA, 24 bp, Artificial Sequence
  Description of Artificial Sequence:  Hypothetical Probe Sequence
tcccctgttcgtacctatcgcgtt

SEQ ID NO: 2296 - DNA, 24 bp, Artificial Sequence
  Description of Artificial Sequence:  Hypothetical Probe Sequence
tcccctgtcgaaaaagcgttagga

SEQ ID NO: 2297 - DNA, 24 bp, Artificial Sequence
  Description of Artificial Sequence:  Hypothetical Probe Sequence
tcccctgtgcaaagtggaccctca

SEQ ID NO: 2298 - DNA, 24 bp, Artificial Sequence
  Description of Artificial Sequence:  Hypothetical Probe Sequence
tcccctgtaggatcccgcaatgat

SEQ ID NO: 2299 - DNA, 24 bp, Artificial Sequence
  Description of Artificial Sequence:  Hypothetical Probe Sequence
tcccctgtcctaagcctgcgggta

SEQ ID NO: 2300 - DNA, 24 bp, Artificial Sequence
  Description of Artificial Sequence:  Hypothetical Probe Sequence
tcccctgtgatgggacacgggacc

SEQ ID NO: 2301 - DNA, 24 bp, Artificial Sequence
  Description of Artificial Sequence:  Hypothetical Probe Sequence
tcccctgttgcgcttgtgtcagcc

SEQ ID NO: 2302 - DNA, 24 bp, Artificial Sequence
  Description of Artificial Sequence:  Hypothetical Probe Sequence
tcccccatttgatcgtagtgcgtt

SEQ ID NO: 2303 - DNA, 24 bp, Artificial Sequence
  Description of Artificial Sequence:  Hypothetical Probe Sequence
tcccccatcttgtgcggatgttag

SEQ ID NO: 2304 - DNA, 24 bp, Artificial Sequence
  Description of Artificial Sequence:  Hypothetical Probe Sequence
tcccccatcgttgtctcgaacgtt

SEQ ID NO: 2305 - DNA, 24 bp, Artificial Sequence
  Description of Artificial Sequence:  Hypothetical Probe Sequence
tcccccatctcagaccatcgccta

SEQ ID NO: 2306 - DNA, 24 bp, Artificial Sequence
  Description of Artificial Sequence:  Hypothetical Probe Sequence
tcccccatgcttcttgcgaaggta

SEQ ID NO: 2307 - DNA, 24 bp, Artificial Sequence
  Description of Artificial Sequence:  Hypothetical Probe Sequence
tcccccatggtattgaaaaggcaa

SEQ ID NO: 2308 - DNA, 24 bp, Artificial Sequence
  Description of Artificial Sequence:  Hypothetical Probe Sequence
tcccccatagtgagtgcgttcagc

SEQ ID NO: 2309 - DNA, 24 bp, Artificial Sequence
  Description of Artificial Sequence:  Hypothetical Probe Sequence
tcccccattgcgaatcagccaatc

SEQ ID NO: 2310 - DNA, 24 bp, Artificial Sequence
  Description of Artificial Sequence:  Hypothetical Probe Sequence
tcccccatgtgccagcttagcagc

SEQ ID NO: 2311 - DNA, 24 bp, Artificial Sequence
  Description of Artificial Sequence:  Hypothetical Probe Sequence
tcccccatggacacctatacagcc

SEQ ID NO: 2312 - DNA, 24 bp, Artificial Sequence
  Description of Artificial Sequence:  Hypothetical Probe Sequence
tccccgaaatacaatctcccggac

SEQ ID NO: 2313 - DNA, 24 bp, Artificial Sequence
  Description of Artificial Sequence:  Hypothetical Probe Sequence
tccccgaaaaaggcaaggtacacg

SEQ ID NO: 2314 - DNA, 24 bp, Artificial Sequence
  Description of Artificial Sequence:  Hypothetical Probe Sequence
tccccgaatacaagtgcagcctca

SEQ ID NO: 2315 - DNA, 24 bp, Artificial Sequence
  Description of Artificial Sequence:  Hypothetical Probe Sequence
tccccgaacttggatgcagcaaag

SEQ ID NO: 2316 - DNA, 24 bp, Artificial Sequence
  Description of Artificial Sequence:  Hypothetical Probe Sequence
tccccgaagcttttgaccattccc

SEQ ID NO: 2317 - DNA, 24 bp, Artificial Sequence
  Description of Artificial Sequence:  Hypothetical Probe Sequence
tccccgaagtctggtagtgctgcg

SEQ ID NO: 2318 - DNA, 24 bp, Artificial Sequence
  Description of Artificial Sequence:  Hypothetical Probe Sequence
tccccgaaagtgggacggactctg

SEQ ID NO: 2319 - DNA, 24 bp, Artificial Sequence
  Description of Artificial Sequence:  Hypothetical Probe Sequence
tccccgaatgcgatcgttagtccc

SEQ ID NO: 2320 - DNA, 24 bp, Artificial Sequence
  Description of Artificial Sequence:  Hypothetical Probe Sequence
tcccgcttttaggaccggacgtct

SEQ ID NO: 2321 - DNA, 24 bp, Artificial Sequence
  Description of Artificial Sequence:  Hypothetical Probe Sequence
tcccgctttacactgtacggggac

SEQ ID NO: 2322 - DNA, 24 bp, Artificial Sequence
  Description of Artificial Sequence:  Hypothetical Probe Sequence
tcccgcttcgaaatcgtctgcttg

SEQ ID NO: 2323 - DNA, 24 bp, Artificial Sequence
  Description of Artificial Sequence:  Hypothetical Probe Sequence
tcccgcttgcttgtgcggtagagt

SEQ ID NO: 2324 - DNA, 24 bp, Artificial Sequence
  Description of Artificial Sequence:  Hypothetical Probe Sequence
tcccgcttgtctaggacttgcagc

SEQ ID NO: 2325 - DNA, 24 bp, Artificial Sequence
  Description of Artificial Sequence:  Hypothetical Probe Sequence
tcccgcttagtgcttggaccgacc

SEQ ID NO: 2326 - DNA, 24 bp, Artificial Sequence
  Description of Artificial Sequence:  Hypothetical Probe Sequence
tcccgcttatcgagccttgattga

SEQ ID NO: 2327 - DNA, 24 bp, Artificial Sequence
  Description of Artificial Sequence:  Hypothetical Probe Sequence
tcccgcttcacgatcgcctagagt

SEQ ID NO: 2328 - DNA, 24 bp, Artificial Sequence
  Description of Artificial Sequence:  Hypothetical Probe Sequence
tcccgcttcagcctcagatgccat

SEQ ID NO: 2329 - DNA, 24 bp, Artificial Sequence
  Description of Artificial Sequence:  Hypothetical Probe Sequence
tcccgcttagcctctggcttttga

SEQ ID NO: 2330 - DNA, 24 bp, Artificial Sequence
  Description of Artificial Sequence:  Hypothetical Probe Sequence
tcccggtatgatcgaagatgtgcg

SEQ ID NO: 2331 - DNA, 24 bp, Artificial Sequence
  Description of Artificial Sequence:  Hypothetical Probe Sequence
tcccggtaaatccacgggtaatcg

SEQ ID NO: 2332 - DNA, 24 bp, Artificial Sequence
  Description of Artificial Sequence:  Hypothetical Probe Sequence
tcccggtatgtccttggctttgcg

SEQ ID NO: 2333 - DNA, 24 bp, Artificial Sequence
  Description of Artificial Sequence:  Hypothetical Probe Sequence
tcccggtactcaaatctgcgatcg

SEQ ID NO: 2334 - DNA, 24 bp, Artificial Sequence
  Description of Artificial Sequence:  Hypothetical Probe Sequence
tcccggtactgtaggaacggcgaa

SEQ ID NO: 2335 - DNA, 24 bp, Artificial Sequence
  Description of Artificial Sequence:  Hypothetical Probe Sequence
tcccggtaggtacctagtgcgcaa

SEQ ID NO: 2336 - DNA, 24 bp, Artificial Sequence
  Description of Artificial Sequence:  Hypothetical Probe Sequence
tcccggtaaggagcttcgttgatg

SEQ ID NO: 2337 - DNA, 24 bp, Artificial Sequence
  Description of Artificial Sequence:  Hypothetical Probe Sequence
tcccggtacctattagcagcgtgc

SEQ ID NO: 2338 - DNA, 24 bp, Artificial Sequence
  Description of Artificial Sequence:  Hypothetical Probe Sequence
tcccggtagatgtcgttctgacgg

SEQ ID NO: 2339 - DNA, 24 bp, Artificial Sequence
  Description of Artificial Sequence:  Hypothetical Probe Sequence
tcccggtatgcgggtaaggatcgt

SEQ ID NO: 2340 - DNA, 24 bp, Artificial Sequence
  Description of Artificial Sequence:  Hypothetical Probe Sequence
tcccggtaagccccatctgtcgaa

SEQ ID NO: 2341 - DNA, 24 bp, Artificial Sequence
  Description of Artificial Sequence:  Hypothetical Probe Sequence
tcccgtctttgagcttgacccttg

SEQ ID NO: 2342 - DNA, 24 bp, Artificial Sequence
  Description of Artificial Sequence:  Hypothetical Probe Sequence
tcccgtcttgtcacggtgcggatg

SEQ ID NO: 2343 - DNA, 24 bp, Artificial Sequence
  Description of Artificial Sequence:  Hypothetical Probe Sequence
tcccgtcttcgtagtgcttgcacg

SEQ ID NO: 2344 - DNA, 24 bp, Artificial Sequence
  Description of Artificial Sequence:  Hypothetical Probe Sequence
tcccgtctctcaaccttgcgtccc

SEQ ID NO: 2345 - DNA, 24 bp, Artificial Sequence
  Description of Artificial Sequence:  Hypothetical Probe Sequence
tcccgtctagtgtcccagccgacc

SEQ ID NO: 2346 - DNA, 24 bp, Artificial Sequence
  Description of Artificial Sequence:  Hypothetical Probe Sequence
tcccgtctacctcctatgcgctgt

SEQ ID NO: 2347 - DNA, 24 bp, Artificial Sequence
  Description of Artificial Sequence:  Hypothetical Probe Sequence
tcccgtctatcgctcatgcgtcgt

SEQ ID NO: 2348 - DNA, 24 bp, Artificial Sequence
  Description of Artificial Sequence:  Hypothetical Probe Sequence
tcccgtctcctaaggagaccccat

SEQ ID NO: 2349 - DNA, 24 bp, Artificial Sequence
  Description of Artificial Sequence:  Hypothetical Probe Sequence
tcccgtcttgcgccatgagttcgt

SEQ ID NO: 2350 - DNA, 24 bp, Artificial Sequence
  Description of Artificial Sequence:  Hypothetical Probe Sequence
tcccgtctcacgaccttgtccacg

SEQ ID NO: 2351 - DNA, 24 bp, Artificial Sequence
  Description of Artificial Sequence:  Hypothetical Probe Sequence
tcccgtctggactctggcttgctt

SEQ ID NO: 2352 - DNA, 24 bp, Artificial Sequence
  Description of Artificial Sequence:  Hypothetical Probe Sequence
tcccgtctacggcttgaatcgtgc

SEQ ID NO: 2353 - DNA, 24 bp, Artificial Sequence
  Description of Artificial Sequence:  Hypothetical Probe Sequence
tcccgtctagccgagtgacccgaa

SEQ ID NO: 2354 - DNA, 24 bp, Artificial Sequence
  Description of Artificial Sequence:  Hypothetical Probe Sequence
tcccgagttgatccatcttgcacg

SEQ ID NO: 2355 - DNA, 24 bp, Artificial Sequence
  Description of Artificial Sequence:  Hypothetical Probe Sequence
tcccgagtcttgatcggcttgctt

SEQ ID NO: 2356 - DNA, 24 bp, Artificial Sequence
  Description of Artificial Sequence:  Hypothetical Probe Sequence
tcccgagtcgaagaccctcaagga

SEQ ID NO: 2357 - DNA, 24 bp, Artificial Sequence
  Description of Artificial Sequence:  Hypothetical Probe Sequence
tcccgagtatcgtctgatcggcaa

SEQ ID NO: 2358 - DNA, 24 bp, Artificial Sequence
  Description of Artificial Sequence:  Hypothetical Probe Sequence
tcccgagtcagcgaccacctgtgc

SEQ ID NO: 2359 - DNA, 24 bp, Artificial Sequence
  Description of Artificial Sequence:  Hypothetical Probe Sequence
tcccgagtgaccacgggcttaatc

SEQ ID NO: 2360 - DNA, 24 bp, Artificial Sequence
  Description of Artificial Sequence:  Hypothetical Probe Sequence
tcccgagtgtgctgtcgatgagcc

SEQ ID NO: 2361 - DNA, 24 bp, Artificial Sequence
  Description of Artificial Sequence:  Hypothetical Probe Sequence
tcccgagtacgggcaaaggaaaag

SEQ ID NO: 2362 - DNA, 24 bp, Artificial Sequence
  Description of Artificial Sequence:  Hypothetical Probe Sequence
tcccgcaattgacgttaaaggtgc

SEQ ID NO: 2363 - DNA, 24 bp, Artificial Sequence
  Description of Artificial Sequence:  Hypothetical Probe Sequence
tcccgcaattagccatcctatgcg

SEQ ID NO: 2364 - DNA, 24 bp, Artificial Sequence
  Description of Artificial Sequence:  Hypothetical Probe Sequence
tcccgcaaaatcggacaatcgctt

SEQ ID NO: 2365 - DNA, 24 bp, Artificial Sequence
  Description of Artificial Sequence:  Hypothetical Probe Sequence
tcccgcaatacaatcgagtggacc

SEQ ID NO: 2366 - DNA, 24 bp, Artificial Sequence
  Description of Artificial Sequence:  Hypothetical Probe Sequence
tcccgcaacttgaaagatcgctgt

SEQ ID NO: 2367 - DNA, 24 bp, Artificial Sequence
  Description of Artificial Sequence:  Hypothetical Probe Sequence
tcccgcaacgaagtgctgattcgt

SEQ ID NO: 2368 - DNA, 24 bp, Artificial Sequence
  Description of Artificial Sequence:  Hypothetical Probe Sequence
tcccgcaagctttctggtgcttga

SEQ ID NO: 2369 - DNA, 24 bp, Artificial Sequence
  Description of Artificial Sequence:  Hypothetical Probe Sequence
tcccgcaagagtccatgcaaccat

SEQ ID NO: 2370 - DNA, 24 bp, Artificial Sequence
  Description of Artificial Sequence:  Hypothetical Probe Sequence
tcccgcaaagtgagtggatgccat

SEQ ID NO: 2371 - DNA, 24 bp, Artificial Sequence
  Description of Artificial Sequence:  Hypothetical Probe Sequence
tcccgcaacagcggacaggaaaag

SEQ ID NO: 2372 - DNA, 24 bp, Artificial Sequence
  Description of Artificial Sequence:  Hypothetical Probe Sequence
tcccgcaaggaccctacttggtgc

SEQ ID NO: 2373 - DNA, 24 bp, Artificial Sequence
  Description of Artificial Sequence:  Hypothetical Probe Sequence
tcccgcaaagccggacataccgaa

SEQ ID NO: 2374 - DNA, 24 bp, Artificial Sequence
  Description of Artificial Sequence:  Hypothetical Probe Sequence
tcccagtgctcagtgccgaatctg

SEQ ID NO: 2375 - DNA, 24 bp, Artificial Sequence
  Description of Artificial Sequence:  Hypothetical Probe Sequence
tcccagtgctgtatcgcacgttga

SEQ ID NO: 2376 - DNA, 24 bp, Artificial Sequence
  Description of Artificial Sequence:  Hypothetical Probe Sequence
tcccagtgccattcccgagtttag

SEQ ID NO: 2377 - DNA, 24 bp, Artificial Sequence
  Description of Artificial Sequence:  Hypothetical Probe Sequence
tcccagtggcaatcgtcgaaggac

SEQ ID NO: 2378 - DNA, 24 bp, Artificial Sequence
  Description of Artificial Sequence:  Hypothetical Probe Sequence
tcccagtgcctaggacgtctgctt

SEQ ID NO: 2379 - DNA, 24 bp, Artificial Sequence
  Description of Artificial Sequence:  Hypothetical Probe Sequence
tcccagtgtccccctagtgccagc

SEQ ID NO: 2380 - DNA, 24 bp, Artificial Sequence
  Description of Artificial Sequence:  Hypothetical Probe Sequence
tcccagtgcagcgtctcgttagcc

SEQ ID NO: 2381 - DNA, 24 bp, Artificial Sequence
  Description of Artificial Sequence:  Hypothetical Probe Sequence
tcccagtgggacagtggcttgcaa

SEQ ID NO: 2382 - DNA, 24 bp, Artificial Sequence
  Description of Artificial Sequence:  Hypothetical Probe Sequence
tcccagtgagcccgtttcgttctg

SEQ ID NO: 2383 - DNA, 24 bp, Artificial Sequence
  Description of Artificial Sequence:  Hypothetical Probe Sequence
tcccaccttctgaatctccctgcg

SEQ ID NO: 2384 - DNA, 24 bp, Artificial Sequence
  Description of Artificial Sequence:  Hypothetical Probe Sequence
tcccaccttgtcatcggtgcaaag

SEQ ID NO: 2385 - DNA, 24 bp, Artificial Sequence
  Description of Artificial Sequence:  Hypothetical Probe Sequence
tcccacctgcaacacgtgtccttg

SEQ ID NO: 2386 - DNA, 24 bp, Artificial Sequence
  Description of Artificial Sequence:  Hypothetical Probe Sequence
tcccacctaggacagctctgcacg

SEQ ID NO: 2387 - DNA, 24 bp, Artificial Sequence
  Description of Artificial Sequence:  Hypothetical Probe Sequence
tcccacctgatgcttgtcgttgcg

SEQ ID NO: 2388 - DNA, 24 bp, Artificial Sequence
  Description of Artificial Sequence:  Hypothetical Probe Sequence
tcccaccttccccacgctcatgtc

SEQ ID NO: 2389 - DNA, 24 bp, Artificial Sequence
  Description of Artificial Sequence:  Hypothetical Probe Sequence
tcccacctcagccttggagtacgg

SEQ ID NO: 2390 - DNA, 24 bp, Artificial Sequence
  Description of Artificial Sequence:  Hypothetical Probe Sequence
tcccacctacggtcgtcgaactca

SEQ ID NO: 2391 - DNA, 24 bp, Artificial Sequence
  Description of Artificial Sequence:  Hypothetical Probe Sequence
tcccatcgcgttgcttaaaggcaa

SEQ ID NO: 2392 - DNA, 24 bp, Artificial Sequence
  Description of Artificial Sequence:  Hypothetical Probe Sequence
tcccatcgccatcagcctcattga

SEQ ID NO: 2393 - DNA, 24 bp, Artificial Sequence
  Description of Artificial Sequence:  Hypothetical Probe Sequence
tcccatcggatgttagaccttgcg

SEQ ID NO: 2394 - DNA, 24 bp, Artificial Sequence
  Description of Artificial Sequence:  Hypothetical Probe Sequence
tcccatcgtgcgaggaggtacacg

SEQ ID NO: 2395 - DNA, 24 bp, Artificial Sequence
  Description of Artificial Sequence:  Hypothetical Probe Sequence
tcccatcgcacgtcgttcccatac

SEQ ID NO: 2396 - DNA, 24 bp, Artificial Sequence
  Description of Artificial Sequence:  Hypothetical Probe Sequence
tcccatcgcagccagcaatcctgt

SEQ ID NO: 2397 - DNA, 24 bp, Artificial Sequence
  Description of Artificial Sequence:  Hypothetical Probe Sequence
tcccatcggaccttgacagcatcg

SEQ ID NO: 2398 - DNA, 24 bp, Artificial Sequence
  Description of Artificial Sequence:  Hypothetical Probe Sequence
tcccatcgggacctcaatcggatg

SEQ ID NO: 2399 - DNA, 24 bp, Artificial Sequence
  Description of Artificial Sequence:  Hypothetical Probe Sequence
tcccatcgagccatcgccatacct

SEQ ID NO: 2400 - DNA, 24 bp, Artificial Sequence
  Description of Artificial Sequence:  Hypothetical Probe Sequence
tcccaggacttggtgcgtgctcgt

SEQ ID NO: 2401 - DNA, 24 bp, Artificial Sequence
  Description of Artificial Sequence:  Hypothetical Probe Sequence
tcccaggagcttacggagccatac

SEQ ID NO: 2402 - DNA, 24 bp, Artificial Sequence
  Description of Artificial Sequence:  Hypothetical Probe Sequence
tcccaggaggtattagtgcgtgcg

SEQ ID NO: 2403 - DNA, 24 bp, Artificial Sequence
  Description of Artificial Sequence:  Hypothetical Probe Sequence
tcccaggagagtggactcccagcc

SEQ ID NO: 2404 - DNA, 24 bp, Artificial Sequence
  Description of Artificial Sequence:  Hypothetical Probe Sequence
tcccaggaacctcgaagcaaccta

SEQ ID NO: 2405 - DNA, 24 bp, Artificial Sequence
  Description of Artificial Sequence:  Hypothetical Probe Sequence
tcccaggagatgtgcgtgcgcttg

SEQ ID NO: 2406 - DNA, 24 bp, Artificial Sequence
  Description of Artificial Sequence:  Hypothetical Probe Sequence
tcccaggatccccctaaggagctt

SEQ ID NO: 2407 - DNA, 24 bp, Artificial Sequence
  Description of Artificial Sequence:  Hypothetical Probe Sequence
tcccaggatgcgaatcgcaattag

SEQ ID NO: 2408 - DNA, 24 bp, Artificial Sequence
  Description of Artificial Sequence:  Hypothetical Probe Sequence
tccccctatgatcgaaagccccta

SEQ ID NO: 2409 - DNA, 24 bp, Artificial Sequence
  Description of Artificial Sequence:  Hypothetical Probe Sequence
tccccctacgttcctaatcggtgc

SEQ ID NO: 2410 - DNA, 24 bp, Artificial Sequence
  Description of Artificial Sequence:  Hypothetical Probe Sequence
tccccctactcagtgcacggggta

SEQ ID NO: 2411 - DNA, 24 bp, Artificial Sequence
  Description of Artificial Sequence:  Hypothetical Probe Sequence
tccccctagcttcacgggtacacg

SEQ ID NO: 2412 - DNA, 24 bp, Artificial Sequence
  Description of Artificial Sequence:  Hypothetical Probe Sequence
tccccctaggtagagttgcggtgc

SEQ ID NO: 2413 - DNA, 24 bp, Artificial Sequence
  Description of Artificial Sequence:  Hypothetical Probe Sequence
tccccctatgcggatgtgcgagtg

SEQ ID NO: 2414 - DNA, 24 bp, Artificial Sequence
  Description of Artificial Sequence:  Hypothetical Probe Sequence
tccccctagaccatacacggcttg

SEQ ID NO: 2415 - DNA, 24 bp, Artificial Sequence
  Description of Artificial Sequence:  Hypothetical Probe Sequence
tccccctaggacaatcctcatgcg

SEQ ID NO: 2416 - DNA, 24 bp, Artificial Sequence
  Description of Artificial Sequence:  Hypothetical Probe Sequence
tccccctaacggctgtggacggta

SEQ ID NO: 2417 - DNA, 24 bp, Artificial Sequence
  Description of Artificial Sequence:  Hypothetical Probe Sequence
tcccgatgttgatccccctaacct

SEQ ID NO: 2418 - DNA, 24 bp, Artificial Sequence
  Description of Artificial Sequence:  Hypothetical Probe Sequence
tcccgatgttagctgtagcctgcg

SEQ ID NO: 2419 - DNA, 24 bp, Artificial Sequence
  Description of Artificial Sequence:  Hypothetical Probe Sequence
tcccgatgtgtcacggtgtcagcc

SEQ ID NO: 2420 - DNA, 24 bp, Artificial Sequence
  Description of Artificial Sequence:  Hypothetical Probe Sequence
tcccgatgctgtaaagggacctgt

SEQ ID NO: 2421 - DNA, 24 bp, Artificial Sequence
  Description of Artificial Sequence:  Hypothetical Probe Sequence
tcccgatgggtaagtgtcccctca

SEQ ID NO: 2422 - DNA, 24 bp, Artificial Sequence
  Description of Artificial Sequence:  Hypothetical Probe Sequence
tcccgatggagttgtccttgacgg

SEQ ID NO: 2423 - DNA, 24 bp, Artificial Sequence
  Description of Artificial Sequence:  Hypothetical Probe Sequence
tcccgatggcaagcaaaaagctca

SEQ ID NO: 2424 - DNA, 24 bp, Artificial Sequence
  Description of Artificial Sequence:  Hypothetical Probe Sequence
tcccgatgatcgggacagtggtgc

SEQ ID NO: 2425 - DNA, 24 bp, Artificial Sequence
  Description of Artificial Sequence:  Hypothetical Probe Sequence
tcccgatgtgcgatacccatagcc

SEQ ID NO: 2426 - DNA, 24 bp, Artificial Sequence
  Description of Artificial Sequence:  Hypothetical Probe Sequence
tcccgatgcacgggaccttgttga

SEQ ID NO: 2427 - DNA, 24 bp, Artificial Sequence
  Description of Artificial Sequence:  Hypothetical Probe Sequence
tcccgatggaccgcaacgttccta

SEQ ID NO: 2428 - DNA, 24 bp, Artificial Sequence
  Description of Artificial Sequence:  Hypothetical Probe Sequence
tcccgatgggaccctacagcctca

SEQ ID NO: 2429 - DNA, 24 bp, Artificial Sequence
  Description of Artificial Sequence:  Hypothetical Probe Sequence
tcccgatgacggctcacttggtgc

SEQ ID NO: 2430 - DNA, 24 bp, Artificial Sequence
  Description of Artificial Sequence:  Hypothetical Probe Sequence
tcccgatgagcctgcgttagacct

SEQ ID NO: 2431 - DNA, 24 bp, Artificial Sequence
  Description of Artificial Sequence:  Hypothetical Probe Sequence
tccctccctgatacctcagcgtgc

SEQ ID NO: 2432 - DNA, 24 bp, Artificial Sequence
  Description of Artificial Sequence:  Hypothetical Probe Sequence
tccctccctacagtgcgcaaacgg

SEQ ID NO: 2433 - DNA, 24 bp, Artificial Sequence
  Description of Artificial Sequence:  Hypothetical Probe Sequence
tccctccctgtccctacgaaatcg

SEQ ID NO: 2434 - DNA, 24 bp, Artificial Sequence
  Description of Artificial Sequence:  Hypothetical Probe Sequence
tccctccccttgttagggacccat

SEQ ID NO: 2435 - DNA, 24 bp, Artificial Sequence
  Description of Artificial Sequence:  Hypothetical Probe Sequence
tccctcccctcacgttccatgagt

SEQ ID NO: 2436 - DNA, 24 bp, Artificial Sequence
  Description of Artificial Sequence:  Hypothetical Probe Sequence
tccctcccctgtgtgcgagtctca

SEQ ID NO: 2437 - DNA, 24 bp, Artificial Sequence
  Description of Artificial Sequence:  Hypothetical Probe Sequence
tccctccccgaattagctgttgcg

SEQ ID NO: 2438 - DNA, 24 bp, Artificial Sequence
  Description of Artificial Sequence:  Hypothetical Probe Sequence
tccctcccatcgcctaatcggagt

SEQ ID NO: 2439 - DNA, 24 bp, Artificial Sequence
  Description of Artificial Sequence:  Hypothetical Probe Sequence
tccctcccaggattgaacgggtct

SEQ ID NO: 2440 - DNA, 24 bp, Artificial Sequence
  Description of Artificial Sequence:  Hypothetical Probe Sequence
tccctcccgatgaaagacctgctt

SEQ ID NO: 2441 - DNA, 24 bp, Artificial Sequence
  Description of Artificial Sequence:  Hypothetical Probe Sequence
tccctcccacggaatcaggacagc

SEQ ID NO: 2442 - DNA, 24 bp, Artificial Sequence
  Description of Artificial Sequence:  Hypothetical Probe Sequence
tccctgcgtgatagtggcaaacct

SEQ ID NO: 2443 - DNA, 24 bp, Artificial Sequence
  Description of Artificial Sequence:  Hypothetical Probe Sequence
tccctgcgatacgtgcaatcgcaa

SEQ ID NO: 2444 - DNA, 24 bp, Artificial Sequence
  Description of Artificial Sequence:  Hypothetical Probe Sequence
tccctgcgaaagagtgcgaaccat

SEQ ID NO: 2445 - DNA, 24 bp, Artificial Sequence
  Description of Artificial Sequence:  Hypothetical Probe Sequence
tccctgcgtacaccatatcgtgcg

SEQ ID NO: 2446 - DNA, 24 bp, Artificial Sequence
  Description of Artificial Sequence:  Hypothetical Probe Sequence
tccctgcgtgtcagtgcttggtgc

SEQ ID NO: 2447 - DNA, 24 bp, Artificial Sequence
  Description of Artificial Sequence:  Hypothetical Probe Sequence
tccctgcgcttgaggaataccgtt

SEQ ID NO: 2448 - DNA, 24 bp, Artificial Sequence
  Description of Artificial Sequence:  Hypothetical Probe Sequence
tccctgcgcgaacacgtgatcacg

SEQ ID NO: 2449 - DNA, 24 bp, Artificial Sequence
  Description of Artificial Sequence:  Hypothetical Probe Sequence
tccctgcggcttttgaagtgagcc

SEQ ID NO: 2450 - DNA, 24 bp, Artificial Sequence
  Description of Artificial Sequence:  Hypothetical Probe Sequence
tccctgcggcaacgttgtctcacg

SEQ ID NO: 2451 - DNA, 24 bp, Artificial Sequence
  Description of Artificial Sequence:  Hypothetical Probe Sequence
tccctgcgacctgcaaatcgtgtc

SEQ ID NO: 2452 - DNA, 24 bp, Artificial Sequence
  Description of Artificial Sequence:  Hypothetical Probe Sequence
tccctgcgaggagagtgtgcggac

SEQ ID NO: 2453 - DNA, 24 bp, Artificial Sequence
  Description of Artificial Sequence:  Hypothetical Probe Sequence
tccctgcgtcccgagtgcaagcaa

SEQ ID NO: 2454 - DNA, 24 bp, Artificial Sequence
  Description of Artificial Sequence:  Hypothetical Probe Sequence
tccctgcgcacgggtacgttgacc

SEQ ID NO: 2455 - DNA, 24 bp, Artificial Sequence
  Description of Artificial Sequence:  Hypothetical Probe Sequence
tccctgcgcagcctgtaggaagcc

SEQ ID NO: 2456 - DNA, 24 bp, Artificial Sequence
  Description of Artificial Sequence:  Hypothetical Probe Sequence
tccctgcggaccctgtcagcctca

SEQ ID NO: 2457 - DNA, 24 bp, Artificial Sequence
  Description of Artificial Sequence:  Hypothetical Probe Sequence
tccctgcggtgcgcttgcaagagt

SEQ ID NO: 2458 - DNA, 24 bp, Artificial Sequence
  Description of Artificial Sequence:  Hypothetical Probe Sequence
tccccacgttgacagctcccaatc

SEQ ID NO: 2459 - DNA, 24 bp, Artificial Sequence
  Description of Artificial Sequence:  Hypothetical Probe Sequence
tccccacgttagtcgtcttgcgaa

SEQ ID NO: 2460 - DNA, 24 bp, Artificial Sequence
  Description of Artificial Sequence:  Hypothetical Probe Sequence
tccccacgtctgggacacggtgtc

SEQ ID NO: 2461 - DNA, 24 bp, Artificial Sequence
  Description of Artificial Sequence:  Hypothetical Probe Sequence
tccccacgtcgtgtgcatactccc

SEQ ID NO: 2462 - DNA, 24 bp, Artificial Sequence
  Description of Artificial Sequence:  Hypothetical Probe Sequence
tccccacgctgttctgagccagtg

SEQ ID NO: 2463 - DNA, 24 bp, Artificial Sequence
  Description of Artificial Sequence:  Hypothetical Probe Sequence
tccccacgggtatcccctgtccat

SEQ ID NO: 2464 - DNA, 24 bp, Artificial Sequence
  Description of Artificial Sequence:  Hypothetical Probe Sequence
tccccacggtctcagcatcgagtg

SEQ ID NO: 2465 - DNA, 24 bp, Artificial Sequence
  Description of Artificial Sequence:  Hypothetical Probe Sequence
tccccacggcaaaatcgtgctctg

SEQ ID NO: 2466 - DNA, 24 bp, Artificial Sequence
  Description of Artificial Sequence:  Hypothetical Probe Sequence
tccccacgacctaatcgatgctca

SEQ ID NO: 2467 - DNA, 24 bp, Artificial Sequence
  Description of Artificial Sequence:  Hypothetical Probe Sequence
tccccacgatcgcgaatgatccat

SEQ ID NO: 2468 - DNA, 24 bp, Artificial Sequence
  Description of Artificial Sequence:  Hypothetical Probe Sequence
tccccacgcctagtgcagccatac

SEQ ID NO: 2469 - DNA, 24 bp, Artificial Sequence
  Description of Artificial Sequence:  Hypothetical Probe Sequence
tccccacgtgcgtgattcgtcgtt

SEQ ID NO: 2470 - DNA, 24 bp, Artificial Sequence
  Description of Artificial Sequence:  Hypothetical Probe Sequence
tccccacgcagccgttcttgacct

SEQ ID NO: 2471 - DNA, 24 bp, Artificial Sequence
  Description of Artificial Sequence:  Hypothetical Probe Sequence
tccccacggaccagcctacacagc

SEQ ID NO: 2472 - DNA, 24 bp, Artificial Sequence
  Description of Artificial Sequence:  Hypothetical Probe Sequence
tccccacggtgctgtctgcgtgat

SEQ ID NO: 2473 - DNA, 24 bp, Artificial Sequence
  Description of Artificial Sequence:  Hypothetical Probe Sequence
tccccacgggacccatcgttgagt

SEQ ID NO: 2474 - DNA, 24 bp, Artificial Sequence
  Description of Artificial Sequence:  Hypothetical Probe Sequence
tccccagcttgaaaaggaccctca

SEQ ID NO: 2475 - DNA, 24 bp, Artificial Sequence
  Description of Artificial Sequence:  Hypothetical Probe Sequence
tccccagcaatcggacggtagacc

SEQ ID NO: 2476 - DNA, 24 bp, Artificial Sequence
  Description of Artificial Sequence:  Hypothetical Probe Sequence
tccccagctacagcaaaaagcagc

SEQ ID NO: 2477 - DNA, 24 bp, Artificial Sequence
  Description of Artificial Sequence:  Hypothetical Probe Sequence
tccccagctctgatcggtctggac

SEQ ID NO: 2478 - DNA, 24 bp, Artificial Sequence
  Description of Artificial Sequence:  Hypothetical Probe Sequence
tccccagctcgtctgtgatggctt

SEQ ID NO: 2479 - DNA, 24 bp, Artificial Sequence
  Description of Artificial Sequence:  Hypothetical Probe Sequence
tccccagccttgctgtatcgggac

SEQ ID NO: 2480 - DNA, 24 bp, Artificial Sequence
  Description of Artificial Sequence:  Hypothetical Probe Sequence
tccccagccgaagtgcctcacttg

SEQ ID NO: 2481 - DNA, 24 bp, Artificial Sequence
  Description of Artificial Sequence:  Hypothetical Probe Sequence
tccccagcggtaaggacagcaaag

SEQ ID NO: 2482 - DNA, 24 bp, Artificial Sequence
  Description of Artificial Sequence:  Hypothetical Probe Sequence
tccccagcacctaatcacgggagt

SEQ ID NO: 2483 - DNA, 24 bp, Artificial Sequence
  Description of Artificial Sequence:  Hypothetical Probe Sequence
tccccagcatcggatgcttgatcg

SEQ ID NO: 2484 - DNA, 24 bp, Artificial Sequence
  Description of Artificial Sequence:  Hypothetical Probe Sequence
tccccagcaggagagtagccccat

SEQ ID NO: 2485 - DNA, 24 bp, Artificial Sequence
  Description of Artificial Sequence:  Hypothetical Probe Sequence
tccccagccagctctgtgtcacgg

SEQ ID NO: 2486 - DNA, 24 bp, Artificial Sequence
  Description of Artificial Sequence:  Hypothetical Probe Sequence
tccccagcggaccgaatgtctgtc

SEQ ID NO: 2487 - DNA, 24 bp, Artificial Sequence
  Description of Artificial Sequence:  Hypothetical Probe Sequence
tccccagcagccggtagcttccat

SEQ ID NO: 2488 - DNA, 24 bp, Artificial Sequence
  Description of Artificial Sequence:  Hypothetical Probe Sequence
tcccgacctgattgattgtctgcg

SEQ ID NO: 2489 - DNA, 24 bp, Artificial Sequence
  Description of Artificial Sequence:  Hypothetical Probe Sequence
tcccgaccttagaatcgtgcccta

SEQ ID NO: 2490 - DNA, 24 bp, Artificial Sequence
  Description of Artificial Sequence:  Hypothetical Probe Sequence
tcccgaccaatcttgagaccgtgc

SEQ ID NO: 2491 - DNA, 24 bp, Artificial Sequence
  Description of Artificial Sequence:  Hypothetical Probe Sequence
tcccgacctacattgaacggacct

SEQ ID NO: 2492 - DNA, 24 bp, Artificial Sequence
  Description of Artificial Sequence:  Hypothetical Probe Sequence
tcccgacctgtctcccgagtaaag

SEQ ID NO: 2493 - DNA, 24 bp, Artificial Sequence
  Description of Artificial Sequence:  Hypothetical Probe Sequence
tcccgacccgttttagcgtttcgt

SEQ ID NO: 2494 - DNA, 24 bp, Artificial Sequence
  Description of Artificial Sequence:  Hypothetical Probe Sequence
tcccgaccctcaggtagcaacacg

SEQ ID NO: 2495 - DNA, 24 bp, Artificial Sequence
  Description of Artificial Sequence:  Hypothetical Probe Sequence
tcccgaccctgtaggacttgagcc

SEQ ID NO: 2496 - DNA, 24 bp, Artificial Sequence
  Description of Artificial Sequence:  Hypothetical Probe Sequence
tcccgaccgtctaaaggaccgatg

SEQ ID NO: 2497 - DNA, 24 bp, Artificial Sequence
  Description of Artificial Sequence:  Hypothetical Probe Sequence
tcccgaccgagtgtcttgcgtctg

SEQ ID NO: 2498 - DNA, 24 bp, Artificial Sequence
  Description of Artificial Sequence:  Hypothetical Probe Sequence
tcccgaccgcaaaggagatgccta

SEQ ID NO: 2499 - DNA, 24 bp, Artificial Sequence
  Description of Artificial Sequence:  Hypothetical Probe Sequence
tcccgacccctaatacgatgagcc

SEQ ID NO: 2500 - DNA, 24 bp, Artificial Sequence
  Description of Artificial Sequence:  Hypothetical Probe Sequence
tcccgacccacggtgcagcctaca

SEQ ID NO: 2501 - DNA, 24 bp, Artificial Sequence
  Description of Artificial Sequence:  Hypothetical Probe Sequence
tcccgtgcttgatctgagtgcagc

SEQ ID NO: 2502 - DNA, 24 bp, Artificial Sequence
  Description of Artificial Sequence:  Hypothetical Probe Sequence
tcccgtgcttagtgatagcccgtt

SEQ ID NO: 2503 - DNA, 24 bp, Artificial Sequence
  Description of Artificial Sequence:  Hypothetical Probe Sequence
tcccgtgctgtcccatcgttccat

SEQ ID NO: 2504 - DNA, 24 bp, Artificial Sequence
  Description of Artificial Sequence:  Hypothetical Probe Sequence
tcccgtgcctcaaatcgtgcagtg

SEQ ID NO: 2505 - DNA, 24 bp, Artificial Sequence
  Description of Artificial Sequence:  Hypothetical Probe Sequence
tcccgtgccgaacgaactcaacct

SEQ ID NO: 2506 - DNA, 24 bp, Artificial Sequence
  Description of Artificial Sequence:  Hypothetical Probe Sequence
tcccgtgcgtctctgtacggtccc

SEQ ID NO: 2507 - DNA, 24 bp, Artificial Sequence
  Description of Artificial Sequence:  Hypothetical Probe Sequence
tcccgtgcacctgtctgatggcaa

SEQ ID NO: 2508 - DNA, 24 bp, Artificial Sequence
  Description of Artificial Sequence:  Hypothetical Probe Sequence
tcccgtgctcccgcttgtgctctg

SEQ ID NO: 2509 - DNA, 24 bp, Artificial Sequence
  Description of Artificial Sequence:  Hypothetical Probe Sequence
tcccgtgcgaccttgaagtgggac

SEQ ID NO: 2510 - DNA, 24 bp, Artificial Sequence
  Description of Artificial Sequence:  Hypothetical Probe Sequence
tcccgtgcgtgcttaggtgcgagt

SEQ ID NO: 2511 - DNA, 24 bp, Artificial Sequence
  Description of Artificial Sequence:  Hypothetical Probe Sequence
tcccgtgcacggaaagcctaggac

SEQ ID NO: 2512 - DNA, 24 bp, Artificial Sequence
  Description of Artificial Sequence:  Hypothetical Probe Sequence
tcccgtgcagccaggattagacgg

SEQ ID NO: 2513 - DNA, 24 bp, Artificial Sequence
  Description of Artificial Sequence:  Hypothetical Probe Sequence
tcccggacaatcatcgaggagacc

SEQ ID NO: 2514 - DNA, 24 bp, Artificial Sequence
  Description of Artificial Sequence:  Hypothetical Probe Sequence
tcccggacatactgtcggactgcg

SEQ ID NO: 2515 - DNA, 24 bp, Artificial Sequence
  Description of Artificial Sequence:  Hypothetical Probe Sequence
tcccggacaaagtcccttagacgg

SEQ ID NO: 2516 - DNA, 24 bp, Artificial Sequence
  Description of Artificial Sequence:  Hypothetical Probe Sequence
tcccggactacacttgacgggtct

SEQ ID NO: 2517 - DNA, 24 bp, Artificial Sequence
  Description of Artificial Sequence:  Hypothetical Probe Sequence
tcccggactcgtcgaagacctcgt

SEQ ID NO: 2518 - DNA, 24 bp, Artificial Sequence
  Description of Artificial Sequence:  Hypothetical Probe Sequence
tcccggaccttgccatctcaatcg

SEQ ID NO: 2519 - DNA, 24 bp, Artificial Sequence
  Description of Artificial Sequence:  Hypothetical Probe Sequence
tcccggaccgttcacgctcagatg

SEQ ID NO: 2520 - DNA, 24 bp, Artificial Sequence
  Description of Artificial Sequence:  Hypothetical Probe Sequence
tcccggacgtctatactccccgaa

SEQ ID NO: 2521 - DNA, 24 bp, Artificial Sequence
  Description of Artificial Sequence:  Hypothetical Probe Sequence
tcccggacatcggagtctcatgcg

SEQ ID NO: 2522 - DNA, 24 bp, Artificial Sequence
  Description of Artificial Sequence:  Hypothetical Probe Sequence
tcccggacgatgccatatcgcttg

SEQ ID NO: 2523 - DNA, 24 bp, Artificial Sequence
  Description of Artificial Sequence:  Hypothetical Probe Sequence
tcccggactgcgaatccctacgaa

SEQ ID NO: 2524 - DNA, 24 bp, Artificial Sequence
  Description of Artificial Sequence:  Hypothetical Probe Sequence
tcccggaccacgttgacgaagacc

SEQ ID NO: 2525 - DNA, 24 bp, Artificial Sequence
  Description of Artificial Sequence:  Hypothetical Probe Sequence
tcccggacgaccggacaaagggta

SEQ ID NO: 2526 - DNA, 24 bp, Artificial Sequence
  Description of Artificial Sequence:  Hypothetical Probe Sequence
tcccggacgtgcaaagtctgacgg

SEQ ID NO: 2527 - DNA, 24 bp, Artificial Sequence
  Description of Artificial Sequence:  Hypothetical Probe Sequence
tcccggacggacgcaaaggatgtc

SEQ ID NO: 2528 - DNA, 24 bp, Artificial Sequence
  Description of Artificial Sequence:  Hypothetical Probe Sequence
tcccggacagccacctagccagtg

SEQ ID NO: 2529 - DNA, 24 bp, Artificial Sequence
  Description of Artificial Sequence:  Hypothetical Probe Sequence
tcccacggttgactgtaggatgcg

SEQ ID NO: 2530 - DNA, 24 bp, Artificial Sequence
  Description of Artificial Sequence:  Hypothetical Probe Sequence
tcccacgggctttctgcgttgagt

SEQ ID NO: 2531 - DNA, 24 bp, Artificial Sequence
  Description of Artificial Sequence:  Hypothetical Probe Sequence
tcccacgggtctggtagcttgtgc

SEQ ID NO: 2532 - DNA, 24 bp, Artificial Sequence
  Description of Artificial Sequence:  Hypothetical Probe Sequence
tcccacggcctatcccatactccc

SEQ ID NO: 2533 - DNA, 24 bp, Artificial Sequence
  Description of Artificial Sequence:  Hypothetical Probe Sequence
tcccacggtgcgcctaatacgcaa

SEQ ID NO: 2534 - DNA, 24 bp, Artificial Sequence
  Description of Artificial Sequence:  Hypothetical Probe Sequence
tcccacgggaccatacctgttgcg

SEQ ID NO: 2535 - DNA, 24 bp, Artificial Sequence
  Description of Artificial Sequence:  Hypothetical Probe Sequence
tcccacgggtgcatcgttagacgg

SEQ ID NO: 2536 - DNA, 24 bp, Artificial Sequence
  Description of Artificial Sequence:  Hypothetical Probe Sequence
tcccagccttgatctgatcggctt

SEQ ID NO: 2537 - DNA, 24 bp, Artificial Sequence
  Description of Artificial Sequence:  Hypothetical Probe Sequence
tcccagcctgatgatgtgcgctca

SEQ ID NO: 2538 - DNA, 24 bp, Artificial Sequence
  Description of Artificial Sequence:  Hypothetical Probe Sequence
tcccagccttagagtgcttggctt

SEQ ID NO: 2539 - DNA, 24 bp, Artificial Sequence
  Description of Artificial Sequence:  Hypothetical Probe Sequence
tcccagccatacaatcacgggtgc

SEQ ID NO: 2540 - DNA, 24 bp, Artificial Sequence
  Description of Artificial Sequence:  Hypothetical Probe Sequence
tcccagcctctgttgagtgcgacc

SEQ ID NO: 2541 - DNA, 24 bp, Artificial Sequence
  Description of Artificial Sequence:  Hypothetical Probe Sequence
tcccagcctcgtgtctacggatcg

SEQ ID NO: 2542 - DNA, 24 bp, Artificial Sequence
  Description of Artificial Sequence:  Hypothetical Probe Sequence
tcccagccctcattagtcccggta

SEQ ID NO: 2543 - DNA, 24 bp, Artificial Sequence
  Description of Artificial Sequence:  Hypothetical Probe Sequence
tcccagccgcttcctaaccttcgt

SEQ ID NO: 2544 - DNA, 24 bp, Artificial Sequence
  Description of Artificial Sequence:  Hypothetical Probe Sequence
tcccagccggtattaggaccccat

SEQ ID NO: 2545 - DNA, 24 bp, Artificial Sequence
  Description of Artificial Sequence:  Hypothetical Probe Sequence
tcccagccagtgttagcctatgcg

SEQ ID NO: 2546 - DNA, 24 bp, Artificial Sequence
  Description of Artificial Sequence:  Hypothetical Probe Sequence
tcccagccacctatactgcggagt

SEQ ID NO: 2547 - DNA, 24 bp, Artificial Sequence
  Description of Artificial Sequence:  Hypothetical Probe Sequence
tcccagccatcggtgctgatagcc

SEQ ID NO: 2548 - DNA, 24 bp, Artificial Sequence
  Description of Artificial Sequence:  Hypothetical Probe Sequence
tcccagcctcccaccttgatcgaa

SEQ ID NO: 2549 - DNA, 24 bp, Artificial Sequence
  Description of Artificial Sequence:  Hypothetical Probe Sequence
tcccagcccacgggtaagcctctg

SEQ ID NO: 2550 - DNA, 24 bp, Artificial Sequence
  Description of Artificial Sequence:  Hypothetical Probe Sequence
tcccagcccagccttggatgatcg

SEQ ID NO: 2551 - DNA, 24 bp, Artificial Sequence
  Description of Artificial Sequence:  Hypothetical Probe Sequence
tcccagccgtgcaaagaggagcaa

SEQ ID NO: 2552 - DNA, 24 bp, Artificial Sequence
  Description of Artificial Sequence:  Hypothetical Probe Sequence
tgcgttgattgagagtacggcgtt

SEQ ID NO: 2553 - DNA, 24 bp, Artificial Sequence
  Description of Artificial Sequence:  Hypothetical Probe Sequence
tgcgttgaaaagatcgtgcgcgtt

SEQ ID NO: 2554 - DNA, 24 bp, Artificial Sequence
  Description of Artificial Sequence:  Hypothetical Probe Sequence
tgcgttgacgttctgtcctatgcg

SEQ ID NO: 2555 - DNA, 24 bp, Artificial Sequence
  Description of Artificial Sequence:  Hypothetical Probe Sequence
tgcgttgaccattcgtatcgcgaa

SEQ ID NO: 2556 - DNA, 24 bp, Artificial Sequence
  Description of Artificial Sequence:  Hypothetical Probe Sequence
tgcgttgacacgcgttttgacgaa

SEQ ID NO: 2557 - DNA, 24 bp, Artificial Sequence
  Description of Artificial Sequence:  Hypothetical Probe Sequence
tgcgttgaggacgatgtcccccat

SEQ ID NO: 2558 - DNA, 24 bp, Artificial Sequence
  Description of Artificial Sequence:  Hypothetical Probe Sequence
tgcgttgaagccagtgcgaagatg

SEQ ID NO: 2559 - DNA, 24 bp, Artificial Sequence
  Description of Artificial Sequence:  Hypothetical Probe Sequence
tgcgtgattgtccagccttggtgc

SEQ ID NO: 2560 - DNA, 24 bp, Artificial Sequence
  Description of Artificial Sequence:  Hypothetical Probe Sequence
tgcgtgatcttgggactccccgtt

SEQ ID NO: 2561 - DNA, 24 bp, Artificial Sequence
  Description of Artificial Sequence:  Hypothetical Probe Sequence
tgcgtgatgctttcccacctgtgc

SEQ ID NO: 2562 - DNA, 24 bp, Artificial Sequence
  Description of Artificial Sequence:  Hypothetical Probe Sequence
tgcgtgatgagtcagccagccacg

SEQ ID NO: 2563 - DNA, 24 bp, Artificial Sequence
  Description of Artificial Sequence:  Hypothetical Probe Sequence
tgcgtgatgcaactgtccattgcg

SEQ ID NO: 2564 - DNA, 24 bp, Artificial Sequence
  Description of Artificial Sequence:  Hypothetical Probe Sequence
tgcgtgattcccacctcttgcagc

SEQ ID NO: 2565 - DNA, 24 bp, Artificial Sequence
  Description of Artificial Sequence:  Hypothetical Probe Sequence
tgcgtgatggacccatatcgcacg

SEQ ID NO: 2566 - DNA, 24 bp, Artificial Sequence
  Description of Artificial Sequence:  Hypothetical Probe Sequence
tgcgtgatagcccagcaatcgcaa

SEQ ID NO: 2567 - DNA, 24 bp, Artificial Sequence
  Description of Artificial Sequence:  Hypothetical Probe Sequence
tgcgttagttgagaccgcttacgg

SEQ ID NO: 2568 - DNA, 24 bp, Artificial Sequence
  Description of Artificial Sequence:  Hypothetical Probe Sequence
tgcgttagaaaggacccacgcgtt

SEQ ID NO: 2569 - DNA, 24 bp, Artificial Sequence
  Description of Artificial Sequence:  Hypothetical Probe Sequence
tgcgttagcgaatgtcggacttga

SEQ ID NO: 2570 - DNA, 24 bp, Artificial Sequence
  Description of Artificial Sequence:  Hypothetical Probe Sequence
tgcgttaggctttcccagtggacc

SEQ ID NO: 2571 - DNA, 24 bp, Artificial Sequence
  Description of Artificial Sequence:  Hypothetical Probe Sequence
tgcgttagtgcgcgaaatactgcg

SEQ ID NO: 2572 - DNA, 24 bp, Artificial Sequence
  Description of Artificial Sequence:  Hypothetical Probe Sequence
tgcgttaggtgcttgagcaacagc

SEQ ID NO: 2573 - DNA, 24 bp, Artificial Sequence
  Description of Artificial Sequence:  Hypothetical Probe Sequence
tgcgttagacgggatgtgcggatg

SEQ ID NO: 2574 - DNA, 24 bp, Artificial Sequence
  Description of Artificial Sequence:  Hypothetical Probe Sequence
tgcgttagagccgcttgatgagcc

SEQ ID NO: 2575 - DNA, 24 bp, Artificial Sequence
  Description of Artificial Sequence:  Hypothetical Probe Sequence
tgcgaatcaaagatcgtccccacg

SEQ ID NO: 2576 - DNA, 24 bp, Artificial Sequence
  Description of Artificial Sequence:  Hypothetical Probe Sequence
tgcgaatctcgttcgtcacgctca

SEQ ID NO: 2577 - DNA, 24 bp, Artificial Sequence
  Description of Artificial Sequence:  Hypothetical Probe Sequence
tgcgaatcctcagacccgaacagc

SEQ ID NO: 2578 - DNA, 24 bp, Artificial Sequence
  Description of Artificial Sequence:  Hypothetical Probe Sequence
tgcgaatcccattcccgtctcttg

SEQ ID NO: 2579 - DNA, 24 bp, Artificial Sequence
  Description of Artificial Sequence:  Hypothetical Probe Sequence
tgcgaatcgagtagccgtgctgat

SEQ ID NO: 2580 - DNA, 24 bp, Artificial Sequence
  Description of Artificial Sequence:  Hypothetical Probe Sequence
tgcgaatcagtgcagctgcgaaag

SEQ ID NO: 2581 - DNA, 24 bp, Artificial Sequence
  Description of Artificial Sequence:  Hypothetical Probe Sequence
tgcgaatccacgcgaactcaagga

SEQ ID NO: 2582 - DNA, 24 bp, Artificial Sequence
  Description of Artificial Sequence:  Hypothetical Probe Sequence
tgcgatacggtatgatagccgcaa

SEQ ID NO: 2583 - DNA, 24 bp, Artificial Sequence
  Description of Artificial Sequence:  Hypothetical Probe Sequence
tgcgatacgcaactgtgcaatccc

SEQ ID NO: 2584 - DNA, 24 bp, Artificial Sequence
  Description of Artificial Sequence:  Hypothetical Probe Sequence
tgcgataccctagcttgtgcgcaa

SEQ ID NO: 2585 - DNA, 24 bp, Artificial Sequence
  Description of Artificial Sequence:  Hypothetical Probe Sequence
tgcgatacgatggctttcccaaag

SEQ ID NO: 2586 - DNA, 24 bp, Artificial Sequence
  Description of Artificial Sequence:  Hypothetical Probe Sequence
tgcgaaagaaagtcccgcttttga

SEQ ID NO: 2587 - DNA, 24 bp, Artificial Sequence
  Description of Artificial Sequence:  Hypothetical Probe Sequence
tgcgaaagtcgtcttgtgcgagga

SEQ ID NO: 2588 - DNA, 24 bp, Artificial Sequence
  Description of Artificial Sequence:  Hypothetical Probe Sequence
tgcgaaagcgttggacatcggtct

SEQ ID NO: 2589 - DNA, 24 bp, Artificial Sequence
  Description of Artificial Sequence:  Hypothetical Probe Sequence
tgcgaaagggtatcgtcacggatg

SEQ ID NO: 2590 - DNA, 24 bp, Artificial Sequence
  Description of Artificial Sequence:  Hypothetical Probe Sequence
tgcgaaaggagtgatgcacgggta

SEQ ID NO: 2591 - DNA, 24 bp, Artificial Sequence
  Description of Artificial Sequence:  Hypothetical Probe Sequence
tgcgaaagacctttagacgggctt

SEQ ID NO: 2592 - DNA, 24 bp, Artificial Sequence
  Description of Artificial Sequence:  Hypothetical Probe Sequence
tgcgaaagtccccgttgagtgctt

SEQ ID NO: 2593 - DNA, 24 bp, Artificial Sequence
  Description of Artificial Sequence:  Hypothetical Probe Sequence
tgcgtacaaaagtgcgcttggctt

SEQ ID NO: 2594 - DNA, 24 bp, Artificial Sequence
  Description of Artificial Sequence:  Hypothetical Probe Sequence
tgcgtacaacctacggtcccctgt

SEQ ID NO: 2595 - DNA, 24 bp, Artificial Sequence
  Description of Artificial Sequence:  Hypothetical Probe Sequence
tgcgtacagaccacggacggggta

SEQ ID NO: 2596 - DNA, 24 bp, Artificial Sequence
  Description of Artificial Sequence:  Hypothetical Probe Sequence
tgcgtctgttgatcccgagtcacg

SEQ ID NO: 2597 - DNA, 24 bp, Artificial Sequence
  Description of Artificial Sequence:  Hypothetical Probe Sequence
tgcgtctgtgatgtgcacgggctt

SEQ ID NO: 2598 - DNA, 24 bp, Artificial Sequence
  Description of Artificial Sequence:  Hypothetical Probe Sequence
tgcgtctgtgtctgcgatcgtcgt

SEQ ID NO: 2599 - DNA, 24 bp, Artificial Sequence
  Description of Artificial Sequence:  Hypothetical Probe Sequence
tgcgtctgtcgtcctacacggcaa

SEQ ID NO: 2600 - DNA, 24 bp, Artificial Sequence
  Description of Artificial Sequence:  Hypothetical Probe Sequence
tgcgtctgcttgaaaggtgcatcg

SEQ ID NO: 2601 - DNA, 24 bp, Artificial Sequence
  Description of Artificial Sequence:  Hypothetical Probe Sequence
tgcgtctgctcaaggatgcgagga

SEQ ID NO: 2602 - DNA, 24 bp, Artificial Sequence
  Description of Artificial Sequence:  Hypothetical Probe Sequence
tgcgtctggcttcacgatacgctt

SEQ ID NO: 2603 - DNA, 24 bp, Artificial Sequence
  Description of Artificial Sequence:  Hypothetical Probe Sequence
tgcgtctggtctagtgacggtgcg

SEQ ID NO: 2604 - DNA, 24 bp, Artificial Sequence
  Description of Artificial Sequence:  Hypothetical Probe Sequence
tgcgtctggcaaatcgttgacacg

SEQ ID NO: 2605 - DNA, 24 bp, Artificial Sequence
  Description of Artificial Sequence:  Hypothetical Probe Sequence
tgcgtctgagtgtccctgcgctca

SEQ ID NO: 2606 - DNA, 24 bp, Artificial Sequence
  Description of Artificial Sequence:  Hypothetical Probe Sequence
tgcgtctgatcgaaagcagcctca

SEQ ID NO: 2607 - DNA, 24 bp, Artificial Sequence
  Description of Artificial Sequence:  Hypothetical Probe Sequence
tgcgtctgcctattgacacggctt

SEQ ID NO: 2608 - DNA, 24 bp, Artificial Sequence
  Description of Artificial Sequence:  Hypothetical Probe Sequence
tgcgtctgcagcttagcgtttctg

SEQ ID NO: 2609 - DNA, 24 bp, Artificial Sequence
  Description of Artificial Sequence:  Hypothetical Probe Sequence
tgcgtgtctgattgcgtccccacg

SEQ ID NO: 2610 - DNA, 24 bp, Artificial Sequence
  Description of Artificial Sequence:  Hypothetical Probe Sequence
tgcgtgtctctgcacggtgctcgt

SEQ ID NO: 2611 - DNA, 24 bp, Artificial Sequence
  Description of Artificial Sequence:  Hypothetical Probe Sequence
tgcgtgtctgtcgtgcggacgctt

SEQ ID NO: 2612 - DNA, 24 bp, Artificial Sequence
  Description of Artificial Sequence:  Hypothetical Probe Sequence
tgcgtgtcgcttatacagccagcc

SEQ ID NO: 2613 - DNA, 24 bp, Artificial Sequence
  Description of Artificial Sequence:  Hypothetical Probe Sequence
tgcgtgtcgagttcccagccaatc

SEQ ID NO: 2614 - DNA, 24 bp, Artificial Sequence
  Description of Artificial Sequence:  Hypothetical Probe Sequence
tgcgtgtcacctatcgatcgccta

SEQ ID NO: 2615 - DNA, 24 bp, Artificial Sequence
  Description of Artificial Sequence:  Hypothetical Probe Sequence
tgcgtgtcaggaggtatcccggta

SEQ ID NO: 2616 - DNA, 24 bp, Artificial Sequence
  Description of Artificial Sequence:  Hypothetical Probe Sequence
tgcgtgtcgatggaccctgtgacc

SEQ ID NO: 2617 - DNA, 24 bp, Artificial Sequence
  Description of Artificial Sequence:  Hypothetical Probe Sequence
tgcgtgtctccccgaatcgtccat

SEQ ID NO: 2618 - DNA, 24 bp, Artificial Sequence
  Description of Artificial Sequence:  Hypothetical Probe Sequence
tgcgtgtcgacctcgtcgttctca

SEQ ID NO: 2619 - DNA, 24 bp, Artificial Sequence
  Description of Artificial Sequence:  Hypothetical Probe Sequence
tgcgtcgtctcaaccttcgtgctt

SEQ ID NO: 2620 - DNA, 24 bp, Artificial Sequence
  Description of Artificial Sequence:  Hypothetical Probe Sequence
tgcgtcgtctgtttaggtcttgcg

SEQ ID NO: 2621 - DNA, 24 bp, Artificial Sequence
  Description of Artificial Sequence:  Hypothetical Probe Sequence
tgcgtcgtgtctagtgagcccacg

SEQ ID NO: 2622 - DNA, 24 bp, Artificial Sequence
  Description of Artificial Sequence:  Hypothetical Probe Sequence
tgcgtcgtcctatgcgaggaaatc

SEQ ID NO: 2623 - DNA, 24 bp, Artificial Sequence
  Description of Artificial Sequence:  Hypothetical Probe Sequence
tgcgtcgtgatgcgttctgtgcaa

SEQ ID NO: 2624 - DNA, 24 bp, Artificial Sequence
  Description of Artificial Sequence:  Hypothetical Probe Sequence
tgcgtcgttccccctattagcacg

SEQ ID NO: 2625 - DNA, 24 bp, Artificial Sequence
  Description of Artificial Sequence:  Hypothetical Probe Sequence
tgcgtcgttgcgggactcgtatcg

SEQ ID NO: 2626 - DNA, 24 bp, Artificial Sequence
  Description of Artificial Sequence:  Hypothetical Probe Sequence
tgcgtcgtcacgcacgctgttgat

SEQ ID NO: 2627 - DNA, 24 bp, Artificial Sequence
  Description of Artificial Sequence:  Hypothetical Probe Sequence
tgcgtcgtgacccctagacccttg

SEQ ID NO: 2628 - DNA, 24 bp, Artificial Sequence
  Description of Artificial Sequence:  Hypothetical Probe Sequence
tgcgtcgtggactcgtcacgttga

SEQ ID NO: 2629 - DNA, 24 bp, Artificial Sequence
  Description of Artificial Sequence:  Hypothetical Probe Sequence
tgcgcttgttagagccttgaatcg

SEQ ID NO: 2630 - DNA, 24 bp, Artificial Sequence
  Description of Artificial Sequence:  Hypothetical Probe Sequence
tgcgcttgtacaataccagcgtgc

SEQ ID NO: 2631 - DNA, 24 bp, Artificial Sequence
  Description of Artificial Sequence:  Hypothetical Probe Sequence
tgcgcttgtctgcgaacgttagga

SEQ ID NO: 2632 - DNA, 24 bp, Artificial Sequence
  Description of Artificial Sequence:  Hypothetical Probe Sequence
tgcgcttgcgtttcgttgatgacc

SEQ ID NO: 2633 - DNA, 24 bp, Artificial Sequence
  Description of Artificial Sequence:  Hypothetical Probe Sequence
tgcgcttgctcaataccgaaacct

SEQ ID NO: 2634 - DNA, 24 bp, Artificial Sequence
  Description of Artificial Sequence:  Hypothetical Probe Sequence
tgcgcttgctgtcgaaccattctg

SEQ ID NO: 2635 - DNA, 24 bp, Artificial Sequence
  Description of Artificial Sequence:  Hypothetical Probe Sequence
tgcgcttggagtatcgaatcccat

SEQ ID NO: 2636 - DNA, 24 bp, Artificial Sequence
  Description of Artificial Sequence:  Hypothetical Probe Sequence
tgcgcttgagtgaatccttgccat

SEQ ID NO: 2637 - DNA, 24 bp, Artificial Sequence
  Description of Artificial Sequence:  Hypothetical Probe Sequence
tgcgcttgatcgatcgagtgcttg

SEQ ID NO: 2638 - DNA, 24 bp, Artificial Sequence
  Description of Artificial Sequence:  Hypothetical Probe Sequence
tgcgcttggatgacgggagttaca

SEQ ID NO: 2639 - DNA, 24 bp, Artificial Sequence
  Description of Artificial Sequence:  Hypothetical Probe Sequence
tgcgcttgcagccacggagtcttg

SEQ ID NO: 2640 - DNA, 24 bp, Artificial Sequence
  Description of Artificial Sequence:  Hypothetical Probe Sequence
tgcgcttggtgcacctcgtttcgt

SEQ ID NO: 2641 - DNA, 24 bp, Artificial Sequence
  Description of Artificial Sequence:  Hypothetical Probe Sequence
tgcgcttgagccgaccacctatcg

SEQ ID NO: 2642 - DNA, 24 bp, Artificial Sequence
  Description of Artificial Sequence:  Hypothetical Probe Sequence
tgcgcgttaatccctaccatcgaa

SEQ ID NO: 2643 - DNA, 24 bp, Artificial Sequence
  Description of Artificial Sequence:  Hypothetical Probe Sequence
tgcgcgttatactctgagccgatg

SEQ ID NO: 2644 - DNA, 24 bp, Artificial Sequence
  Description of Artificial Sequence:  Hypothetical Probe Sequence
tgcgcgttaaagaatcgcaaaaag

SEQ ID NO: 2645 - DNA, 24 bp, Artificial Sequence
  Description of Artificial Sequence:  Hypothetical Probe Sequence
tgcgcgtttctgcttgatcgtcgt

SEQ ID NO: 2646 - DNA, 24 bp, Artificial Sequence
  Description of Artificial Sequence:  Hypothetical Probe Sequence
tgcgcgtttcgtcgaacgaagtct

SEQ ID NO: 2647 - DNA, 24 bp, Artificial Sequence
  Description of Artificial Sequence:  Hypothetical Probe Sequence
tgcgcgttcgttagtgcttgctca

SEQ ID NO: 2648 - DNA, 24 bp, Artificial Sequence
  Description of Artificial Sequence:  Hypothetical Probe Sequence
tgcgcgttggtaccatttagcgaa

SEQ ID NO: 2649 - DNA, 24 bp, Artificial Sequence
  Description of Artificial Sequence:  Hypothetical Probe Sequence
tgcgcgttgtctggtagacccttg

SEQ ID NO: 2650 - DNA, 24 bp, Artificial Sequence
  Description of Artificial Sequence:  Hypothetical Probe Sequence
tgcgcgttatcgttgattgaacgg

SEQ ID NO: 2651 - DNA, 24 bp, Artificial Sequence
  Description of Artificial Sequence:  Hypothetical Probe Sequence
tgcgcgttgatgtcccttgaagtg

SEQ ID NO: 2652 - DNA, 24 bp, Artificial Sequence
  Description of Artificial Sequence:  Hypothetical Probe Sequence
tgcgcgtttcccgcttacctggac

SEQ ID NO: 2653 - DNA, 24 bp, Artificial Sequence
  Description of Artificial Sequence:  Hypothetical Probe Sequence
tgcgcgttcacggagtcacgccta

SEQ ID NO: 2654 - DNA, 24 bp, Artificial Sequence
  Description of Artificial Sequence:  Hypothetical Probe Sequence
tgcgcgttcagcttagagcctccc

SEQ ID NO: 2655 - DNA, 24 bp, Artificial Sequence
  Description of Artificial Sequence:  Hypothetical Probe Sequence
tgcgcgttgacctcccatacgagt

SEQ ID NO: 2656 - DNA, 24 bp, Artificial Sequence
  Description of Artificial Sequence:  Hypothetical Probe Sequence
tgcgcgttacggggtagatggtgc

SEQ ID NO: 2657 - DNA, 24 bp, Artificial Sequence
  Description of Artificial Sequence:  Hypothetical Probe Sequence
tgcgctcatgataatcagccggac

SEQ ID NO: 2658 - DNA, 24 bp, Artificial Sequence
  Description of Artificial Sequence:  Hypothetical Probe Sequence
tgcgctcattagcacgcacggagt

SEQ ID NO: 2659 - DNA, 24 bp, Artificial Sequence
  Description of Artificial Sequence:  Hypothetical Probe Sequence
tgcgctcaaaagctcaatcgtccc

SEQ ID NO: 2660 - DNA, 24 bp, Artificial Sequence
  Description of Artificial Sequence:  Hypothetical Probe Sequence
tgcgctcatacatgcgggtatgat

SEQ ID NO: 2661 - DNA, 24 bp, Artificial Sequence
  Description of Artificial Sequence:  Hypothetical Probe Sequence
tgcgctcatctgatcgtgtccgtt

SEQ ID NO: 2662 - DNA, 24 bp, Artificial Sequence
  Description of Artificial Sequence:  Hypothetical Probe Sequence
tgcgctcacgttatcgcttgagga

SEQ ID NO: 2663 - DNA, 24 bp, Artificial Sequence
  Description of Artificial Sequence:  Hypothetical Probe Sequence
tgcgctcactgttcccgtctgatg

SEQ ID NO: 2664 - DNA, 24 bp, Artificial Sequence
  Description of Artificial Sequence:  Hypothetical Probe Sequence
tgcgctcagcaaagtgctcagcaa

SEQ ID NO: 2665 - DNA, 24 bp, Artificial Sequence
  Description of Artificial Sequence:  Hypothetical Probe Sequence
tgcgctcacctacgaaaaagggac

SEQ ID NO: 2666 - DNA, 24 bp, Artificial Sequence
  Description of Artificial Sequence:  Hypothetical Probe Sequence
tgcgctcagatggtgcgagtggac

SEQ ID NO: 2667 - DNA, 24 bp, Artificial Sequence
  Description of Artificial Sequence:  Hypothetical Probe Sequence
tgcgctgttgataaagtgcggacc

SEQ ID NO: 2668 - DNA, 24 bp, Artificial Sequence
  Description of Artificial Sequence:  Hypothetical Probe Sequence
tgcgctgtaatcgcttgtcttgcg

SEQ ID NO: 2669 - DNA, 24 bp, Artificial Sequence
  Description of Artificial Sequence:  Hypothetical Probe Sequence
tgcgctgtatacgaccacggtccc

SEQ ID NO: 2670 - DNA, 24 bp, Artificial Sequence
  Description of Artificial Sequence:  Hypothetical Probe Sequence
tgcgctgttacacctaacggagga

SEQ ID NO: 2671 - DNA, 24 bp, Artificial Sequence
  Description of Artificial Sequence:  Hypothetical Probe Sequence
tgcgctgttctgtgatagccgtgc

SEQ ID NO: 2672 - DNA, 24 bp, Artificial Sequence
  Description of Artificial Sequence:  Hypothetical Probe Sequence
tgcgctgttgtcaatcgcaagacc

SEQ ID NO: 2673 - DNA, 24 bp, Artificial Sequence
  Description of Artificial Sequence:  Hypothetical Probe Sequence
tgcgctgtcttggaccagtgccat

SEQ ID NO: 2674 - DNA, 24 bp, Artificial Sequence
  Description of Artificial Sequence:  Hypothetical Probe Sequence
tgcgctgtctcaccattctgcgtt

SEQ ID NO: 2675 - DNA, 24 bp, Artificial Sequence
  Description of Artificial Sequence:  Hypothetical Probe Sequence
tgcgctgtctgttctgcgaaatcg

SEQ ID NO: 2676 - DNA, 24 bp, Artificial Sequence
  Description of Artificial Sequence:  Hypothetical Probe Sequence
tgcgctgtccatcctaaaagcgtt

SEQ ID NO: 2677 - DNA, 24 bp, Artificial Sequence
  Description of Artificial Sequence:  Hypothetical Probe Sequence
tgcgctgtcgaaaatcccatccta

SEQ ID NO: 2678 - DNA, 24 bp, Artificial Sequence
  Description of Artificial Sequence:  Hypothetical Probe Sequence
tgcgctgtggtagagttcccggac

SEQ ID NO: 2679 - DNA, 24 bp, Artificial Sequence
  Description of Artificial Sequence:  Hypothetical Probe Sequence
tgcgctgtagtgggaccgttgctt

SEQ ID NO: 2680 - DNA, 24 bp, Artificial Sequence
  Description of Artificial Sequence:  Hypothetical Probe Sequence
tgcgctgtcagcttagctcatgcg

SEQ ID NO: 2681 - DNA, 24 bp, Artificial Sequence
  Description of Artificial Sequence:  Hypothetical Probe Sequence
tgcgctgtgaccggacccatacct

SEQ ID NO: 2682 - DNA, 24 bp, Artificial Sequence
  Description of Artificial Sequence:  Hypothetical Probe Sequence
tgcgctgtacgggtgctctgctca

SEQ ID NO: 2683 - DNA, 24 bp, Artificial Sequence
  Description of Artificial Sequence:  Hypothetical Probe Sequence
tgcgctgtagccgagtcttgcgtt

SEQ ID NO: 2684 - DNA, 24 bp, Artificial Sequence
  Description of Artificial Sequence:  Hypothetical Probe Sequence
tgcgccatttgaacctatcggctt

SEQ ID NO: 2685 - DNA, 24 bp, Artificial Sequence
  Description of Artificial Sequence:  Hypothetical Probe Sequence
tgcgccatttaggagtcgttgctt

SEQ ID NO: 2686 - DNA, 24 bp, Artificial Sequence
  Description of Artificial Sequence:  Hypothetical Probe Sequence
tgcgccataatctctgtgcgctca

SEQ ID NO: 2687 - DNA, 24 bp, Artificial Sequence
  Description of Artificial Sequence:  Hypothetical Probe Sequence
tgcgccatcgaagtctttgaacgg

SEQ ID NO: 2688 - DNA, 24 bp, Artificial Sequence
  Description of Artificial Sequence:  Hypothetical Probe Sequence
tgcgccatgtctgatggaccctca

SEQ ID NO: 2689 - DNA, 24 bp, Artificial Sequence
  Description of Artificial Sequence:  Hypothetical Probe Sequence
tgcgccatatcggtctcagcgctt

SEQ ID NO: 2690 - DNA, 24 bp, Artificial Sequence
  Description of Artificial Sequence:  Hypothetical Probe Sequence
tgcgccattccctcgttacatccc

SEQ ID NO: 2691 - DNA, 24 bp, Artificial Sequence
  Description of Artificial Sequence:  Hypothetical Probe Sequence
tgcgccatgacctgatcttgacgg

SEQ ID NO: 2692 - DNA, 24 bp, Artificial Sequence
  Description of Artificial Sequence:  Hypothetical Probe Sequence
tgcgccatggacccatcgaagatg

SEQ ID NO: 2693 - DNA, 24 bp, Artificial Sequence
  Description of Artificial Sequence:  Hypothetical Probe Sequence
tgcgccatacggctgtctcatgcg

SEQ ID NO: 2694 - DNA, 24 bp, Artificial Sequence
  Description of Artificial Sequence:  Hypothetical Probe Sequence
tgcgcgaatgatcgttcttgggac

SEQ ID NO: 2695 - DNA, 24 bp, Artificial Sequence
  Description of Artificial Sequence:  Hypothetical Probe Sequence
tgcgcgaaaatcaaagcagctgtc

SEQ ID NO: 2696 - DNA, 24 bp, Artificial Sequence
  Description of Artificial Sequence:  Hypothetical Probe Sequence
tgcgcgaactcagaccaggacacg

SEQ ID NO: 2697 - DNA, 24 bp, Artificial Sequence
  Description of Artificial Sequence:  Hypothetical Probe Sequence
tgcgcgaaccatctgttgtccgaa

SEQ ID NO: 2698 - DNA, 24 bp, Artificial Sequence
  Description of Artificial Sequence:  Hypothetical Probe Sequence
tgcgcgaacgaaagccaaagaatc

SEQ ID NO: 2699 - DNA, 24 bp, Artificial Sequence
  Description of Artificial Sequence:  Hypothetical Probe Sequence
tgcgcgaagcaactcaccatcgaa

SEQ ID NO: 2700 - DNA, 24 bp, Artificial Sequence
  Description of Artificial Sequence:  Hypothetical Probe Sequence
tgcgcgaaatcgtgatccatcagc

SEQ ID NO: 2701 - DNA, 24 bp, Artificial Sequence
  Description of Artificial Sequence:  Hypothetical Probe Sequence
tgcgcgaaaggagatggtgcccta

SEQ ID NO: 2702 - DNA, 24 bp, Artificial Sequence
  Description of Artificial Sequence:  Hypothetical Probe Sequence
tgcgcgaatccccctacagccttg

SEQ ID NO: 2703 - DNA, 24 bp, Artificial Sequence
  Description of Artificial Sequence:  Hypothetical Probe Sequence
tgcggcttatacaatcgcttgcaa

SEQ ID NO: 2704 - DNA, 24 bp, Artificial Sequence
  Description of Artificial Sequence:  Hypothetical Probe Sequence
tgcggctttctgcagctcgtgacc

SEQ ID NO: 2705 - DNA, 24 bp, Artificial Sequence
  Description of Artificial Sequence:  Hypothetical Probe Sequence
tgcggcttcttgctgtgaccgatg

SEQ ID NO: 2706 - DNA, 24 bp, Artificial Sequence
  Description of Artificial Sequence:  Hypothetical Probe Sequence
tgcggcttctcaagtgagtgcgaa

SEQ ID NO: 2707 - DNA, 24 bp, Artificial Sequence
  Description of Artificial Sequence:  Hypothetical Probe Sequence
tgcggcttcgaattgatctgacgg

SEQ ID NO: 2708 - DNA, 24 bp, Artificial Sequence
  Description of Artificial Sequence:  Hypothetical Probe Sequence
tgcggcttgcaatctgaaagagcc

SEQ ID NO: 2709 - DNA, 24 bp, Artificial Sequence
  Description of Artificial Sequence:  Hypothetical Probe Sequence
tgcggctttccccagccctagagt

SEQ ID NO: 2710 - DNA, 24 bp, Artificial Sequence
  Description of Artificial Sequence:  Hypothetical Probe Sequence
tgcggcttcacgggaccgaactca

SEQ ID NO: 2711 - DNA, 24 bp, Artificial Sequence
  Description of Artificial Sequence:  Hypothetical Probe Sequence
tgcggcttagccgacccgaattag

SEQ ID NO: 2712 - DNA, 24 bp, Artificial Sequence
  Description of Artificial Sequence:  Hypothetical Probe Sequence
tgcgggtaaaagaggaggaccgtt

SEQ ID NO: 2713 - DNA, 24 bp, Artificial Sequence
  Description of Artificial Sequence:  Hypothetical Probe Sequence
tgcgggtatacaccatacggatcg

SEQ ID NO: 2714 - DNA, 24 bp, Artificial Sequence
  Description of Artificial Sequence:  Hypothetical Probe Sequence
tgcgggtatgtccacgaaagcacg

SEQ ID NO: 2715 - DNA, 24 bp, Artificial Sequence
  Description of Artificial Sequence:  Hypothetical Probe Sequence
tgcgggtacgttcagccttggtct

SEQ ID NO: 2716 - DNA, 24 bp, Artificial Sequence
  Description of Artificial Sequence:  Hypothetical Probe Sequence
tgcgggtactcagcaacgtttcgt

SEQ ID NO: 2717 - DNA, 24 bp, Artificial Sequence
  Description of Artificial Sequence:  Hypothetical Probe Sequence
tgcgggtactgtgcaacttgtccc

SEQ ID NO: 2718 - DNA, 24 bp, Artificial Sequence
  Description of Artificial Sequence:  Hypothetical Probe Sequence
tgcgggtagcttagccgagtagga

SEQ ID NO: 2719 - DNA, 24 bp, Artificial Sequence
  Description of Artificial Sequence:  Hypothetical Probe Sequence
tgcgggtagagtggaccttgccta

SEQ ID NO: 2720 - DNA, 24 bp, Artificial Sequence
  Description of Artificial Sequence:  Hypothetical Probe Sequence
tgcgggtacctagacccagctctg

SEQ ID NO: 2721 - DNA, 24 bp, Artificial Sequence
  Description of Artificial Sequence:  Hypothetical Probe Sequence
tgcgggtacacgtgtcacggagtg

SEQ ID NO: 2722 - DNA, 24 bp, Artificial Sequence
  Description of Artificial Sequence:  Hypothetical Probe Sequence
tgcgggtagtgctgtctgtcgctt

SEQ ID NO: 2723 - DNA, 24 bp, Artificial Sequence
  Description of Artificial Sequence:  Hypothetical Probe Sequence
tgcgggtaggaccctagagttgcg

SEQ ID NO: 2724 - DNA, 24 bp, Artificial Sequence
  Description of Artificial Sequence:  Hypothetical Probe Sequence
tgcgggtaagccgtctgcaacacg

SEQ ID NO: 2725 - DNA, 24 bp, Artificial Sequence
  Description of Artificial Sequence:  Hypothetical Probe Sequence
tgcggtcttgatcgaatcgtacgg

SEQ ID NO: 2726 - DNA, 24 bp, Artificial Sequence
  Description of Artificial Sequence:  Hypothetical Probe Sequence
tgcggtctttagctgttcgttgcg

SEQ ID NO: 2727 - DNA, 24 bp, Artificial Sequence
  Description of Artificial Sequence:  Hypothetical Probe Sequence
tgcggtctaaaggatgcagcgctt

SEQ ID NO: 2728 - DNA, 24 bp, Artificial Sequence
  Description of Artificial Sequence:  Hypothetical Probe Sequence
tgcggtcttctgtcccttagtgcg

SEQ ID NO: 2729 - DNA, 24 bp, Artificial Sequence
  Description of Artificial Sequence:  Hypothetical Probe Sequence
tgcggtcttgtccagccgttaaag

SEQ ID NO: 2730 - DNA, 24 bp, Artificial Sequence
  Description of Artificial Sequence:  Hypothetical Probe Sequence
tgcggtctcttgggtatccccagc

SEQ ID NO: 2731 - DNA, 24 bp, Artificial Sequence
  Description of Artificial Sequence:  Hypothetical Probe Sequence
tgcggtctctgtttgaatcgacgg

SEQ ID NO: 2732 - DNA, 24 bp, Artificial Sequence
  Description of Artificial Sequence:  Hypothetical Probe Sequence
tgcggtctcgaaaggagcaaagga

SEQ ID NO: 2733 - DNA, 24 bp, Artificial Sequence
  Description of Artificial Sequence:  Hypothetical Probe Sequence
tgcggtctggtatcccgaccccat

SEQ ID NO: 2734 - DNA, 24 bp, Artificial Sequence
  Description of Artificial Sequence:  Hypothetical Probe Sequence
tgcggtctgagtagtgtgcgtccc

SEQ ID NO: 2735 - DNA, 24 bp, Artificial Sequence
  Description of Artificial Sequence:  Hypothetical Probe Sequence
tgcggtctacctgcaaaaaggcaa

SEQ ID NO: 2736 - DNA, 24 bp, Artificial Sequence
  Description of Artificial Sequence:  Hypothetical Probe Sequence
tgcggtctatcggaccgatgccta

SEQ ID NO: 2737 - DNA, 24 bp, Artificial Sequence
  Description of Artificial Sequence:  Hypothetical Probe Sequence
tgcggtctaggaaaaggacccgaa

SEQ ID NO: 2738 - DNA, 24 bp, Artificial Sequence
  Description of Artificial Sequence:  Hypothetical Probe Sequence
tgcggtctgatgaaagcttgtgcg

SEQ ID NO: 2739 - DNA, 24 bp, Artificial Sequence
  Description of Artificial Sequence:  Hypothetical Probe Sequence
tgcggtctcagccgaacttgagga

SEQ ID NO: 2740 - DNA, 24 bp, Artificial Sequence
  Description of Artificial Sequence:  Hypothetical Probe Sequence
tgcggagttgatagccttagcacg

SEQ ID NO: 2741 - DNA, 24 bp, Artificial Sequence
  Description of Artificial Sequence:  Hypothetical Probe Sequence
tgcggagtatacgtgcggtaacgg

SEQ ID NO: 2742 - DNA, 24 bp, Artificial Sequence
  Description of Artificial Sequence:  Hypothetical Probe Sequence
tgcggagttctgatacgcaacacg

SEQ ID NO: 2743 - DNA, 24 bp, Artificial Sequence
  Description of Artificial Sequence:  Hypothetical Probe Sequence
tgcggagttcgttctggaccccta

SEQ ID NO: 2744 - DNA, 24 bp, Artificial Sequence
  Description of Artificial Sequence:  Hypothetical Probe Sequence
tgcggagtgcaagacccgaataca

SEQ ID NO: 2745 - DNA, 24 bp, Artificial Sequence
  Description of Artificial Sequence:  Hypothetical Probe Sequence
tgcggagttccctgtcgatgtcgt

SEQ ID NO: 2746 - DNA, 24 bp, Artificial Sequence
  Description of Artificial Sequence:  Hypothetical Probe Sequence
tgcggagtgtgcgtgcaccttctg

SEQ ID NO: 2747 - DNA, 24 bp, Artificial Sequence
  Description of Artificial Sequence:  Hypothetical Probe Sequence
tgcggagtggaccgttgagttccc

SEQ ID NO: 2748 - DNA, 24 bp, Artificial Sequence
  Description of Artificial Sequence:  Hypothetical Probe Sequence
tgcggcaattgagatgcgtttgat

SEQ ID NO: 2749 - DNA, 24 bp, Artificial Sequence
  Description of Artificial Sequence:  Hypothetical Probe Sequence
tgcggcaattagcgttacctgctt

SEQ ID NO: 2750 - DNA, 24 bp, Artificial Sequence
  Description of Artificial Sequence:  Hypothetical Probe Sequence
tgcggcaaaatcttagcagcggta

SEQ ID NO: 2751 - DNA, 24 bp, Artificial Sequence
  Description of Artificial Sequence:  Hypothetical Probe Sequence
tgcggcaaaaagttagggaccagc

SEQ ID NO: 2752 - DNA, 24 bp, Artificial Sequence
  Description of Artificial Sequence:  Hypothetical Probe Sequence
tgcggcaatctgataccttgacgg

SEQ ID NO: 2753 - DNA, 24 bp, Artificial Sequence
  Description of Artificial Sequence:  Hypothetical Probe Sequence
tgcggcaacgaatgattccctctg

SEQ ID NO: 2754 - DNA, 24 bp, Artificial Sequence
  Description of Artificial Sequence:  Hypothetical Probe Sequence
tgcggcaagcttaaaggagtgctt

SEQ ID NO: 2755 - DNA, 24 bp, Artificial Sequence
  Description of Artificial Sequence:  Hypothetical Probe Sequence
tgcggcaagtctgacccacgctca

SEQ ID NO: 2756 - DNA, 24 bp, Artificial Sequence
  Description of Artificial Sequence:  Hypothetical Probe Sequence
tgcggcaagagtatcgatcggtct

SEQ ID NO: 2757 - DNA, 24 bp, Artificial Sequence
  Description of Artificial Sequence:  Hypothetical Probe Sequence
tgcggcaagatgaggaaaaggtgc

SEQ ID NO: 2758 - DNA, 24 bp, Artificial Sequence
  Description of Artificial Sequence:  Hypothetical Probe Sequence
tgcggcaatcccgcttataccgaa

SEQ ID NO: 2759 - DNA, 24 bp, Artificial Sequence
  Description of Artificial Sequence:  Hypothetical Probe Sequence
tgcggcaacagcaaagacctcgtt

SEQ ID NO: 2760 - DNA, 24 bp, Artificial Sequence
  Description of Artificial Sequence:  Hypothetical Probe Sequence
tgcggcaagacccctaacctggac

SEQ ID NO: 2761 - DNA, 24 bp, Artificial Sequence
  Description of Artificial Sequence:  Hypothetical Probe Sequence
tgcggcaagtgcaaagcgaaggta

SEQ ID NO: 2762 - DNA, 24 bp, Artificial Sequence
  Description of Artificial Sequence:  Hypothetical Probe Sequence
tgcgagtgtctgagcccagcgcaa

SEQ ID NO: 2763 - DNA, 24 bp, Artificial Sequence
  Description of Artificial Sequence:  Hypothetical Probe Sequence
tgcgagtgtcgttgcgaggattga

SEQ ID NO: 2764 - DNA, 24 bp, Artificial Sequence
  Description of Artificial Sequence:  Hypothetical Probe Sequence
tgcgagtgcttgcagcatacagcc

SEQ ID NO: 2765 - DNA, 24 bp, Artificial Sequence
  Description of Artificial Sequence:  Hypothetical Probe Sequence
tgcgagtggcttccattgatagcc

SEQ ID NO: 2766 - DNA, 24 bp, Artificial Sequence
  Description of Artificial Sequence:  Hypothetical Probe Sequence
tgcgagtgggtacttgtccccgtt

SEQ ID NO: 2767 - DNA, 24 bp, Artificial Sequence
  Description of Artificial Sequence:  Hypothetical Probe Sequence
tgcgagtgacctcgaatcccgcaa

SEQ ID NO: 2768 - DNA, 24 bp, Artificial Sequence
  Description of Artificial Sequence:  Hypothetical Probe Sequence
tgcgagtgaggagatgcgttccat

SEQ ID NO: 2769 - DNA, 24 bp, Artificial Sequence
  Description of Artificial Sequence:  Hypothetical Probe Sequence
tgcgagtgtgcggtgccttgagtg

SEQ ID NO: 2770 - DNA, 24 bp, Artificial Sequence
  Description of Artificial Sequence:  Hypothetical Probe Sequence
tgcgagtgcagcacctagtgtgcg

SEQ ID NO: 2771 - DNA, 24 bp, Artificial Sequence
  Description of Artificial Sequence:  Hypothetical Probe Sequence
tgcgaccttgatcagcgtgcaaag

SEQ ID NO: 2772 - DNA, 24 bp, Artificial Sequence
  Description of Artificial Sequence:  Hypothetical Probe Sequence
tgcgacctaaaggtgctgcgtcgt

SEQ ID NO: 2773 - DNA, 24 bp, Artificial Sequence
  Description of Artificial Sequence:  Hypothetical Probe Sequence
tgcgaccttacaggacaggaacgg

SEQ ID NO: 2774 - DNA, 24 bp, Artificial Sequence
  Description of Artificial Sequence:  Hypothetical Probe Sequence
tgcgaccttcgtgtctgacctgcg

SEQ ID NO: 2775 - DNA, 24 bp, Artificial Sequence
  Description of Artificial Sequence:  Hypothetical Probe Sequence
tgcgacctcttgcgtttcccctgt

SEQ ID NO: 2776 - DNA, 24 bp, Artificial Sequence
  Description of Artificial Sequence:  Hypothetical Probe Sequence
tgcgacctctcattaggaccagcc

SEQ ID NO: 2777 - DNA, 24 bp, Artificial Sequence
  Description of Artificial Sequence:  Hypothetical Probe Sequence
tgcgacctctgtcagcccatgtgc

SEQ ID NO: 2778 - DNA, 24 bp, Artificial Sequence
  Description of Artificial Sequence:  Hypothetical Probe Sequence
tgcgacctccatgcaacttggtct

SEQ ID NO: 2779 - DNA, 24 bp, Artificial Sequence
  Description of Artificial Sequence:  Hypothetical Probe Sequence
tgcgacctcgaagcttaaagcgaa

SEQ ID NO: 2780 - DNA, 24 bp, Artificial Sequence
  Description of Artificial Sequence:  Hypothetical Probe Sequence
tgcgacctggtaaaagcttgtccc

SEQ ID NO: 2781 - DNA, 24 bp, Artificial Sequence
  Description of Artificial Sequence:  Hypothetical Probe Sequence
tgcgacctagtgaccttgcgacct

SEQ ID NO: 2782 - DNA, 24 bp, Artificial Sequence
  Description of Artificial Sequence:  Hypothetical Probe Sequence
tgcgacctacctcctaacggggta

SEQ ID NO: 2783 - DNA, 24 bp, Artificial Sequence
  Description of Artificial Sequence:  Hypothetical Probe Sequence
tgcgacctatcgcagcatacacgg

SEQ ID NO: 2784 - DNA, 24 bp, Artificial Sequence
  Description of Artificial Sequence:  Hypothetical Probe Sequence
tgcgaccttccccgaacacgaatc

SEQ ID NO: 2785 - DNA, 24 bp, Artificial Sequence
  Description of Artificial Sequence:  Hypothetical Probe Sequence
tgcgaccttgcggtgcaggattga

SEQ ID NO: 2786 - DNA, 24 bp, Artificial Sequence
  Description of Artificial Sequence:  Hypothetical Probe Sequence
tgcgacctcacgttgacacggacc

SEQ ID NO: 2787 - DNA, 24 bp, Artificial Sequence
  Description of Artificial Sequence:  Hypothetical Probe Sequence
tgcgacctggaccgttcgaaccta

SEQ ID NO: 2788 - DNA, 24 bp, Artificial Sequence
  Description of Artificial Sequence:  Hypothetical Probe Sequence
tgcgatcgttgatccccagcttag

SEQ ID NO: 2789 - DNA, 24 bp, Artificial Sequence
  Description of Artificial Sequence:  Hypothetical Probe Sequence
tgcgatcgtgataatcgatgccat

SEQ ID NO: 2790 - DNA, 24 bp, Artificial Sequence
  Description of Artificial Sequence:  Hypothetical Probe Sequence
tgcgatcgtgtcgcttcacgagga

SEQ ID NO: 2791 - DNA, 24 bp, Artificial Sequence
  Description of Artificial Sequence:  Hypothetical Probe Sequence
tgcgatcgcttgtcgtggacagtg

SEQ ID NO: 2792 - DNA, 24 bp, Artificial Sequence
  Description of Artificial Sequence:  Hypothetical Probe Sequence
tgcgatcgccatggtacacgctgt

SEQ ID NO: 2793 - DNA, 24 bp, Artificial Sequence
  Description of Artificial Sequence:  Hypothetical Probe Sequence
tgcgatcgggtaaatccttgctca

SEQ ID NO: 2794 - DNA, 24 bp, Artificial Sequence
  Description of Artificial Sequence:  Hypothetical Probe Sequence
tgcgatcgagtggcaaccatccat

SEQ ID NO: 2795 - DNA, 24 bp, Artificial Sequence
  Description of Artificial Sequence:  Hypothetical Probe Sequence
tgcgatcgatcgtgtccttggtgc

SEQ ID NO: 2796 - DNA, 24 bp, Artificial Sequence
  Description of Artificial Sequence:  Hypothetical Probe Sequence
tgcgatcgcctacctacgaaccat

SEQ ID NO: 2797 - DNA, 24 bp, Artificial Sequence
  Description of Artificial Sequence:  Hypothetical Probe Sequence
tgcgatcgtcccgtctccatacgg

SEQ ID NO: 2798 - DNA, 24 bp, Artificial Sequence
  Description of Artificial Sequence:  Hypothetical Probe Sequence
tgcgatcgcagcaaagtgtcagcc

SEQ ID NO: 2799 - DNA, 24 bp, Artificial Sequence
  Description of Artificial Sequence:  Hypothetical Probe Sequence
tgcgatcgacggacctgcaaagtg

SEQ ID NO: 2800 - DNA, 24 bp, Artificial Sequence
  Description of Artificial Sequence:  Hypothetical Probe Sequence
tgcgatcgagccatacagccgtct

SEQ ID NO: 2801 - DNA, 24 bp, Artificial Sequence
  Description of Artificial Sequence:  Hypothetical Probe Sequence
tgcgaggattagcacgatcgccat

SEQ ID NO: 2802 - DNA, 24 bp, Artificial Sequence
  Description of Artificial Sequence:  Hypothetical Probe Sequence
tgcgaggatgtctccctcccaatc

SEQ ID NO: 2803 - DNA, 24 bp, Artificial Sequence
  Description of Artificial Sequence:  Hypothetical Probe Sequence
tgcgaggacttgcacgtacatgcg

SEQ ID NO: 2804 - DNA, 24 bp, Artificial Sequence
  Description of Artificial Sequence:  Hypothetical Probe Sequence
tgcgaggactgtagccccatcacg

SEQ ID NO: 2805 - DNA, 24 bp, Artificial Sequence
  Description of Artificial Sequence:  Hypothetical Probe Sequence
tgcgaggagcaaaaaggaccacct

SEQ ID NO: 2806 - DNA, 24 bp, Artificial Sequence
  Description of Artificial Sequence:  Hypothetical Probe Sequence
tgcgaggaagtgagtgggaccacg

SEQ ID NO: 2807 - DNA, 24 bp, Artificial Sequence
  Description of Artificial Sequence:  Hypothetical Probe Sequence
tgcgaggaaggatgcgttagagga

SEQ ID NO: 2808 - DNA, 24 bp, Artificial Sequence
  Description of Artificial Sequence:  Hypothetical Probe Sequence
tgcgaggacagccgttcagcttga

SEQ ID NO: 2809 - DNA, 24 bp, Artificial Sequence
  Description of Artificial Sequence:  Hypothetical Probe Sequence
tgcgaggaacgggagtcacgcttg

SEQ ID NO: 2810 - DNA, 24 bp, Artificial Sequence
  Description of Artificial Sequence:  Hypothetical Probe Sequence
tgcgcctattgacgaatgtcgctt

SEQ ID NO: 2811 - DNA, 24 bp, Artificial Sequence
  Description of Artificial Sequence:  Hypothetical Probe Sequence
tgcgcctatacaagccggaccttg

SEQ ID NO: 2812 - DNA, 24 bp, Artificial Sequence
  Description of Artificial Sequence:  Hypothetical Probe Sequence
tgcgcctatgtcaggaagccaatc

SEQ ID NO: 2813 - DNA, 24 bp, Artificial Sequence
  Description of Artificial Sequence:  Hypothetical Probe Sequence
tgcgcctacttgtgcgttgaaatc

SEQ ID NO: 2814 - DNA, 24 bp, Artificial Sequence
  Description of Artificial Sequence:  Hypothetical Probe Sequence
tgcgcctacgaaataccagcacct

SEQ ID NO: 2815 - DNA, 24 bp, Artificial Sequence
  Description of Artificial Sequence:  Hypothetical Probe Sequence
tgcgcctaggtaaatccgttagcc

SEQ ID NO: 2816 - DNA, 24 bp, Artificial Sequence
  Description of Artificial Sequence:  Hypothetical Probe Sequence
tgcgcctagtctcacgcagctaca

SEQ ID NO: 2817 - DNA, 24 bp, Artificial Sequence
  Description of Artificial Sequence:  Hypothetical Probe Sequence
tgcgcctatcccgcaatgtcgagt

SEQ ID NO: 2818 - DNA, 24 bp, Artificial Sequence
  Description of Artificial Sequence:  Hypothetical Probe Sequence
tgcgcctatgcgagtgcctaagga

SEQ ID NO: 2819 - DNA, 24 bp, Artificial Sequence
  Description of Artificial Sequence:  Hypothetical Probe Sequence
tgcgcctacacggatgaaagacgg

SEQ ID NO: 2820 - DNA, 24 bp, Artificial Sequence
  Description of Artificial Sequence:  Hypothetical Probe Sequence
tgcgcctaggacaccttgcgtaca

SEQ ID NO: 2821 - DNA, 24 bp, Artificial Sequence
  Description of Artificial Sequence:  Hypothetical Probe Sequence
tgcgcctaacggcctaacctgtgc

SEQ ID NO: 2822 - DNA, 24 bp, Artificial Sequence
  Description of Artificial Sequence:  Hypothetical Probe Sequence
tgcgcctaagccctcaaggaagga

SEQ ID NO: 2823 - DNA, 24 bp, Artificial Sequence
  Description of Artificial Sequence:  Hypothetical Probe Sequence
tgcggatgttgagtgcgctttgtc

SEQ ID NO: 2824 - DNA, 24 bp, Artificial Sequence
  Description of Artificial Sequence:  Hypothetical Probe Sequence
tgcggatgtgatgcttccatgctt

SEQ ID NO: 2825 - DNA, 24 bp, Artificial Sequence
  Description of Artificial Sequence:  Hypothetical Probe Sequence
tgcggatgtgtccgttaaagcgaa

SEQ ID NO: 2826 - DNA, 24 bp, Artificial Sequence
  Description of Artificial Sequence:  Hypothetical Probe Sequence
tgcggatgcgttgatgcagctctg

SEQ ID NO: 2827 - DNA, 24 bp, Artificial Sequence
  Description of Artificial Sequence:  Hypothetical Probe Sequence
tgcggatgctcaatacgtcttccc

SEQ ID NO: 2828 - DNA, 24 bp, Artificial Sequence
  Description of Artificial Sequence:  Hypothetical Probe Sequence
tgcggatgctgtgatggcaactca

SEQ ID NO: 2829 - DNA, 24 bp, Artificial Sequence
  Description of Artificial Sequence:  Hypothetical Probe Sequence
tgcggatggcaaagtgaggatgcg

SEQ ID NO: 2830 - DNA, 24 bp, Artificial Sequence
  Description of Artificial Sequence:  Hypothetical Probe Sequence
tgcggatgcctatcgtcgttggac

SEQ ID NO: 2831 - DNA, 24 bp, Artificial Sequence
  Description of Artificial Sequence:  Hypothetical Probe Sequence
tgcggatgcacgcgttggacagtg

SEQ ID NO: 2832 - DNA, 24 bp, Artificial Sequence
  Description of Artificial Sequence:  Hypothetical Probe Sequence
tgcggatggtgccgaacttgacct

SEQ ID NO: 2833 - DNA, 24 bp, Artificial Sequence
  Description of Artificial Sequence:  Hypothetical Probe Sequence
tgcggatgggacttgacagcccat

SEQ ID NO: 2834 - DNA, 24 bp, Artificial Sequence
  Description of Artificial Sequence:  Hypothetical Probe Sequence
tgcggatgacggtgtcaatcgctt

SEQ ID NO: 2835 - DNA, 24 bp, Artificial Sequence
  Description of Artificial Sequence:  Hypothetical Probe Sequence
tgcgtcccaatctctgaccttccc

SEQ ID NO: 2836 - DNA, 24 bp, Artificial Sequence
  Description of Artificial Sequence:  Hypothetical Probe Sequence
tgcgtcccaaagcttggcaactgt

SEQ ID NO: 2837 - DNA, 24 bp, Artificial Sequence
  Description of Artificial Sequence:  Hypothetical Probe Sequence
tgcgtccctcgtaaaggtctcgaa

SEQ ID NO: 2838 - DNA, 24 bp, Artificial Sequence
  Description of Artificial Sequence:  Hypothetical Probe Sequence
tgcgtccccttgcttgaatcagcc

SEQ ID NO: 2839 - DNA, 24 bp, Artificial Sequence
  Description of Artificial Sequence:  Hypothetical Probe Sequence
tgcgtccccgttgatggcttggac

SEQ ID NO: 2840 - DNA, 24 bp, Artificial Sequence
  Description of Artificial Sequence:  Hypothetical Probe Sequence
tgcgtcccccataatcaatccagc

SEQ ID NO: 2841 - DNA, 24 bp, Artificial Sequence
  Description of Artificial Sequence:  Hypothetical Probe Sequence
tgcgtccccgaaccatacctcagc

SEQ ID NO: 2842 - DNA, 24 bp, Artificial Sequence
  Description of Artificial Sequence:  Hypothetical Probe Sequence
tgcgtcccggtaatacaggaagcc

SEQ ID NO: 2843 - DNA, 24 bp, Artificial Sequence
  Description of Artificial Sequence:  Hypothetical Probe Sequence
tgcgtcccgtctgagttgtcgctt

SEQ ID NO: 2844 - DNA, 24 bp, Artificial Sequence
  Description of Artificial Sequence:  Hypothetical Probe Sequence
tgcgtcccacctatcgctgtcgtt

SEQ ID NO: 2845 - DNA, 24 bp, Artificial Sequence
  Description of Artificial Sequence:  Hypothetical Probe Sequence
tgcgtccctccctcccagtgatcg

SEQ ID NO: 2846 - DNA, 24 bp, Artificial Sequence
  Description of Artificial Sequence:  Hypothetical Probe Sequence
tgcgtcccggacctcaagtgacgg

SEQ ID NO: 2847 - DNA, 24 bp, Artificial Sequence
  Description of Artificial Sequence:  Hypothetical Probe Sequence
tgcgtcccacggaggaaatcccta

SEQ ID NO: 2848 - DNA, 24 bp, Artificial Sequence
  Description of Artificial Sequence:  Hypothetical Probe Sequence
tgcgtgcgataccttgcctaacct

SEQ ID NO: 2849 - DNA, 24 bp, Artificial Sequence
  Description of Artificial Sequence:  Hypothetical Probe Sequence
tgcgtgcgtctgatacggacggac

SEQ ID NO: 2850 - DNA, 24 bp, Artificial Sequence
  Description of Artificial Sequence:  Hypothetical Probe Sequence
tgcgtgcgtgtcctcacagcccta

SEQ ID NO: 2851 - DNA, 24 bp, Artificial Sequence
  Description of Artificial Sequence:  Hypothetical Probe Sequence
tgcgtgcgtcgtcagctgtcagga

SEQ ID NO: 2852 - DNA, 24 bp, Artificial Sequence
  Description of Artificial Sequence:  Hypothetical Probe Sequence
tgcgtgcggcttagtggcaaagga

SEQ ID NO: 2853 - DNA, 24 bp, Artificial Sequence
  Description of Artificial Sequence:  Hypothetical Probe Sequence
tgcgtgcggagtcctacgttggac

SEQ ID NO: 2854 - DNA, 24 bp, Artificial Sequence
  Description of Artificial Sequence:  Hypothetical Probe Sequence
tgcgtgcgatcgcgtttgtcctgt

SEQ ID NO: 2855 - DNA, 24 bp, Artificial Sequence
  Description of Artificial Sequence:  Hypothetical Probe Sequence
tgcgtgcgcctaccatcttgctgt

SEQ ID NO: 2856 - DNA, 24 bp, Artificial Sequence
  Description of Artificial Sequence:  Hypothetical Probe Sequence
tgcgtgcgtcccgctttgtctcgt

SEQ ID NO: 2857 - DNA, 24 bp, Artificial Sequence
  Description of Artificial Sequence:  Hypothetical Probe Sequence
tgcgcacgttgaaaagaggaagcc

SEQ ID NO: 2858 - DNA, 24 bp, Artificial Sequence
  Description of Artificial Sequence:  Hypothetical Probe Sequence
tgcgcacgttagcgttacggtgat

SEQ ID NO: 2859 - DNA, 24 bp, Artificial Sequence
  Description of Artificial Sequence:  Hypothetical Probe Sequence
tgcgcacgaaagacctagccgtct

SEQ ID NO: 2860 - DNA, 24 bp, Artificial Sequence
  Description of Artificial Sequence:  Hypothetical Probe Sequence
tgcgcacgtcgtcacggaccatac

SEQ ID NO: 2861 - DNA, 24 bp, Artificial Sequence
  Description of Artificial Sequence:  Hypothetical Probe Sequence
tgcgcacgctgtccatcacgagga

SEQ ID NO: 2862 - DNA, 24 bp, Artificial Sequence
  Description of Artificial Sequence:  Hypothetical Probe Sequence
tgcgcacggtctaatcgtgctgtc

SEQ ID NO: 2863 - DNA, 24 bp, Artificial Sequence
  Description of Artificial Sequence:  Hypothetical Probe Sequence
tgcgcacgcctattaggagtagcc

SEQ ID NO: 2864 - DNA, 24 bp, Artificial Sequence
  Description of Artificial Sequence:  Hypothetical Probe Sequence
tgcgcacggatgctgttctggtgc

SEQ ID NO: 2865 - DNA, 24 bp, Artificial Sequence
  Description of Artificial Sequence:  Hypothetical Probe Sequence
tgcgcacgtcccaccttcgtgatg

SEQ ID NO: 2866 - DNA, 24 bp, Artificial Sequence
  Description of Artificial Sequence:  Hypothetical Probe Sequence
tgcgcacggaccagtgtcgtcgaa

SEQ ID NO: 2867 - DNA, 24 bp, Artificial Sequence
  Description of Artificial Sequence:  Hypothetical Probe Sequence
tgcgcacgggactcgtggtaggac

SEQ ID NO: 2868 - DNA, 24 bp, Artificial Sequence
  Description of Artificial Sequence:  Hypothetical Probe Sequence
tgcgcacgagccgtctaggaacgg

SEQ ID NO: 2869 - DNA, 24 bp, Artificial Sequence
  Description of Artificial Sequence:  Hypothetical Probe Sequence
tgcgcagcttgacagcaggagctt

SEQ ID NO: 2870 - DNA, 24 bp, Artificial Sequence
  Description of Artificial Sequence:  Hypothetical Probe Sequence
tgcgcagctgatttagcgaagctt

SEQ ID NO: 2871 - DNA, 24 bp, Artificial Sequence
  Description of Artificial Sequence:  Hypothetical Probe Sequence
tgcgcagcttaggcttaatcgcaa

SEQ ID NO: 2872 - DNA, 24 bp, Artificial Sequence
  Description of Artificial Sequence:  Hypothetical Probe Sequence
tgcgcagcatactctgcagcctca

SEQ ID NO: 2873 - DNA, 24 bp, Artificial Sequence
  Description of Artificial Sequence:  Hypothetical Probe Sequence
tgcgcagctcgtgtctcagcccta

SEQ ID NO: 2874 - DNA, 24 bp, Artificial Sequence
  Description of Artificial Sequence:  Hypothetical Probe Sequence
tgcgcagcccatttaggcttatcg

SEQ ID NO: 2875 - DNA, 24 bp, Artificial Sequence
  Description of Artificial Sequence:  Hypothetical Probe Sequence
tgcgcagcggtactcaacggagtg

SEQ ID NO: 2876 - DNA, 24 bp, Artificial Sequence
  Description of Artificial Sequence:  Hypothetical Probe Sequence
tgcgcagcgagtgcaaatacacgg

SEQ ID NO: 2877 - DNA, 24 bp, Artificial Sequence
  Description of Artificial Sequence:  Hypothetical Probe Sequence
tgcgcagcatcgttagggtatccc

SEQ ID NO: 2878 - DNA, 24 bp, Artificial Sequence
  Description of Artificial Sequence:  Hypothetical Probe Sequence
tgcgcagccctagatgtcgtagcc

SEQ ID NO: 2879 - DNA, 24 bp, Artificial Sequence
  Description of Artificial Sequence:  Hypothetical Probe Sequence
tgcgcagcgatgataccacgagga

SEQ ID NO: 2880 - DNA, 24 bp, Artificial Sequence
  Description of Artificial Sequence:  Hypothetical Probe Sequence
tgcgcagccagccagccctactca

SEQ ID NO: 2881 - DNA, 24 bp, Artificial Sequence
  Description of Artificial Sequence:  Hypothetical Probe Sequence
tgcgcagcgaccaaagaaaggcaa

SEQ ID NO: 2882 - DNA, 24 bp, Artificial Sequence
  Description of Artificial Sequence:  Hypothetical Probe Sequence
tgcgcagcagcctcgttctgtcgt

SEQ ID NO: 2883 - DNA, 24 bp, Artificial Sequence
  Description of Artificial Sequence:  Hypothetical Probe Sequence
tgcggacctgatcgaatgtcggta

SEQ ID NO: 2884 - DNA, 24 bp, Artificial Sequence
  Description of Artificial Sequence:  Hypothetical Probe Sequence
tgcggaccaatcaggagaccgatg

SEQ ID NO: 2885 - DNA, 24 bp, Artificial Sequence
  Description of Artificial Sequence:  Hypothetical Probe Sequence
tgcggaccatacaatctgcggtct

SEQ ID NO: 2886 - DNA, 24 bp, Artificial Sequence
  Description of Artificial Sequence:  Hypothetical Probe Sequence
tgcggacctacactgttcccggac

SEQ ID NO: 2887 - DNA, 24 bp, Artificial Sequence
  Description of Artificial Sequence:  Hypothetical Probe Sequence
tgcggacctgtctgatacgggacc

SEQ ID NO: 2888 - DNA, 24 bp, Artificial Sequence
  Description of Artificial Sequence:  Hypothetical Probe Sequence
tgcggacccgttgcaattagggac

SEQ ID NO: 2889 - DNA, 24 bp, Artificial Sequence
  Description of Artificial Sequence:  Hypothetical Probe Sequence
tgcggaccccatctgttctggctt

SEQ ID NO: 2890 - DNA, 24 bp, Artificial Sequence
  Description of Artificial Sequence:  Hypothetical Probe Sequence
tgcggacccgaacttgatcggatg

SEQ ID NO: 2891 - DNA, 24 bp, Artificial Sequence
  Description of Artificial Sequence:  Hypothetical Probe Sequence
tgcggaccgagtccatgtgctgtc

SEQ ID NO: 2892 - DNA, 24 bp, Artificial Sequence
  Description of Artificial Sequence:  Hypothetical Probe Sequence
tgcggaccaggaaaaggtcttcgt

SEQ ID NO: 2893 - DNA, 24 bp, Artificial Sequence
  Description of Artificial Sequence:  Hypothetical Probe Sequence
tgcggaccgatgtgtcagtgacgg

SEQ ID NO: 2894 - DNA, 24 bp, Artificial Sequence
  Description of Artificial Sequence:  Hypothetical Probe Sequence
tgcggacccagctcgtcttgctgt

SEQ ID NO: 2895 - DNA, 24 bp, Artificial Sequence
  Description of Artificial Sequence:  Hypothetical Probe Sequence
tgcggaccgaccggtagcaaccat

SEQ ID NO: 2896 - DNA, 24 bp, Artificial Sequence
  Description of Artificial Sequence:  Hypothetical Probe Sequence
tgcggaccacggaaagccatgtct

SEQ ID NO: 2897 - DNA, 24 bp, Artificial Sequence
  Description of Artificial Sequence:  Hypothetical Probe Sequence
tgcggtgcaatcacggcctagtct

SEQ ID NO: 2898 - DNA, 24 bp, Artificial Sequence
  Description of Artificial Sequence:  Hypothetical Probe Sequence
tgcggtgcaaagcgttcacgtctg

SEQ ID NO: 2899 - DNA, 24 bp, Artificial Sequence
  Description of Artificial Sequence:  Hypothetical Probe Sequence
tgcggtgctgtccctatcccgtct

SEQ ID NO: 2900 - DNA, 24 bp, Artificial Sequence
  Description of Artificial Sequence:  Hypothetical Probe Sequence
tgcggtgccgttatcgaaaggacc

SEQ ID NO: 2901 - DNA, 24 bp, Artificial Sequence
  Description of Artificial Sequence:  Hypothetical Probe Sequence
tgcggtgcacctccatccatcttg

SEQ ID NO: 2902 - DNA, 24 bp, Artificial Sequence
  Description of Artificial Sequence:  Hypothetical Probe Sequence
tgcggtgctcccctgtacggagga

SEQ ID NO: 2903 - DNA, 24 bp, Artificial Sequence
  Description of Artificial Sequence:  Hypothetical Probe Sequence
tgcggtgcagcccctaccatgctt

SEQ ID NO: 2904 - DNA, 24 bp, Artificial Sequence
  Description of Artificial Sequence:  Hypothetical Probe Sequence
tgcgggacttgagtctgtgcggta

SEQ ID NO: 2905 - DNA, 24 bp, Artificial Sequence
  Description of Artificial Sequence:  Hypothetical Probe Sequence
tgcgggactgatttgacagcccta

SEQ ID NO: 2906 - DNA, 24 bp, Artificial Sequence
  Description of Artificial Sequence:  Hypothetical Probe Sequence
tgcgggacatacgcttagccagga

SEQ ID NO: 2907 - DNA, 24 bp, Artificial Sequence
  Description of Artificial Sequence:  Hypothetical Probe Sequence
tgcgggacaaagttagcgttgtgc

SEQ ID NO: 2908 - DNA, 24 bp, Artificial Sequence
  Description of Artificial Sequence:  Hypothetical Probe Sequence
tgcgggactgtctctgagccccta

SEQ ID NO: 2909 - DNA, 24 bp, Artificial Sequence
  Description of Artificial Sequence:  Hypothetical Probe Sequence
tgcgggaccttgttaggagttgcg

SEQ ID NO: 2910 - DNA, 24 bp, Artificial Sequence
  Description of Artificial Sequence:  Hypothetical Probe Sequence
tgcgggaccgttggtatcccaatc

SEQ ID NO: 2911 - DNA, 24 bp, Artificial Sequence
  Description of Artificial Sequence:  Hypothetical Probe Sequence
tgcgggacctcagaccacctgctt

SEQ ID NO: 2912 - DNA, 24 bp, Artificial Sequence
  Description of Artificial Sequence:  Hypothetical Probe Sequence
tgcgggacctgtaatccgttcagc

SEQ ID NO: 2913 - DNA, 24 bp, Artificial Sequence
  Description of Artificial Sequence:  Hypothetical Probe Sequence
tgcgggaccgaacgttctcagtgc

SEQ ID NO: 2914 - DNA, 24 bp, Artificial Sequence
  Description of Artificial Sequence:  Hypothetical Probe Sequence
tgcgggacgcttgcttatactgcg

SEQ ID NO: 2915 - DNA, 24 bp, Artificial Sequence
  Description of Artificial Sequence:  Hypothetical Probe Sequence
tgcgggacgtctacctgcttgatg

SEQ ID NO: 2916 - DNA, 24 bp, Artificial Sequence
  Description of Artificial Sequence:  Hypothetical Probe Sequence
tgcgggacagtgacggacctacct

SEQ ID NO: 2917 - DNA, 24 bp, Artificial Sequence
  Description of Artificial Sequence:  Hypothetical Probe Sequence
tgcgggacatcgctcatcgtcgaa

SEQ ID NO: 2918 - DNA, 24 bp, Artificial Sequence
  Description of Artificial Sequence:  Hypothetical Probe Sequence
tgcgggaccctatacagcaatccc

SEQ ID NO: 2919 - DNA, 24 bp, Artificial Sequence
  Description of Artificial Sequence:  Hypothetical Probe Sequence
tgcgggacgatggtgcgatgagtg

SEQ ID NO: 2920 - DNA, 24 bp, Artificial Sequence
  Description of Artificial Sequence:  Hypothetical Probe Sequence
tgcgggactgcgtgtcccattctg

SEQ ID NO: 2921 - DNA, 24 bp, Artificial Sequence
  Description of Artificial Sequence:  Hypothetical Probe Sequence
tgcgggacagccatacgcaagctt

SEQ ID NO: 2922 - DNA, 24 bp, Artificial Sequence
  Description of Artificial Sequence:  Hypothetical Probe Sequence
tgcgacggttaggctttctggctt

SEQ ID NO: 2923 - DNA, 24 bp, Artificial Sequence
  Description of Artificial Sequence:  Hypothetical Probe Sequence
tgcgacggaatcaatcatcgacgg

SEQ ID NO: 2924 - DNA, 24 bp, Artificial Sequence
  Description of Artificial Sequence:  Hypothetical Probe Sequence
tgcgacggtctgcgaattagcgtt

SEQ ID NO: 2925 - DNA, 24 bp, Artificial Sequence
  Description of Artificial Sequence:  Hypothetical Probe Sequence
tgcgacggctcattgaagtggtgc

SEQ ID NO: 2926 - DNA, 24 bp, Artificial Sequence
  Description of Artificial Sequence:  Hypothetical Probe Sequence
tgcgacggctgtccatacctgtgc

SEQ ID NO: 2927 - DNA, 24 bp, Artificial Sequence
  Description of Artificial Sequence:  Hypothetical Probe Sequence
tgcgacgggtctcttggagtagcc

SEQ ID NO: 2928 - DNA, 24 bp, Artificial Sequence
  Description of Artificial Sequence:  Hypothetical Probe Sequence
tgcgacgggagtcgttaaaggctt

SEQ ID NO: 2929 - DNA, 24 bp, Artificial Sequence
  Description of Artificial Sequence:  Hypothetical Probe Sequence
tgcgacggagtgacctcacgccta

SEQ ID NO: 2930 - DNA, 24 bp, Artificial Sequence
  Description of Artificial Sequence:  Hypothetical Probe Sequence
tgcgacggaggatgtcggactcgt

SEQ ID NO: 2931 - DNA, 24 bp, Artificial Sequence
  Description of Artificial Sequence:  Hypothetical Probe Sequence
tgcgacgggatggtgctgtcatcg

SEQ ID NO: 2932 - DNA, 24 bp, Artificial Sequence
  Description of Artificial Sequence:  Hypothetical Probe Sequence
tgcgacgggtgcggtaaggagtgc

SEQ ID NO: 2933 - DNA, 24 bp, Artificial Sequence
  Description of Artificial Sequence:  Hypothetical Probe Sequence
tgcgacggggacgcttagcctgat

SEQ ID NO: 2934 - DNA, 24 bp, Artificial Sequence
  Description of Artificial Sequence:  Hypothetical Probe Sequence
tgcgagccttgatgtctctgtgcg

SEQ ID NO: 2935 - DNA, 24 bp, Artificial Sequence
  Description of Artificial Sequence:  Hypothetical Probe Sequence
tgcgagcctgattctggcaagacc

SEQ ID NO: 2936 - DNA, 24 bp, Artificial Sequence
  Description of Artificial Sequence:  Hypothetical Probe Sequence
tgcgagccttaggcaatctgcttg

SEQ ID NO: 2937 - DNA, 24 bp, Artificial Sequence
  Description of Artificial Sequence:  Hypothetical Probe Sequence
tgcgagccaaagggacataccagc

SEQ ID NO: 2938 - DNA, 24 bp, Artificial Sequence
  Description of Artificial Sequence:  Hypothetical Probe Sequence
tgcgagcctacaaaaggtgcctgt

SEQ ID NO: 2939 - DNA, 24 bp, Artificial Sequence
  Description of Artificial Sequence:  Hypothetical Probe Sequence
tgcgagcctgtcgacctacaacgg

SEQ ID NO: 2940 - DNA, 24 bp, Artificial Sequence
  Description of Artificial Sequence:  Hypothetical Probe Sequence
tgcgagccctcaggtaggaccgaa

SEQ ID NO: 2941 - DNA, 24 bp, Artificial Sequence
  Description of Artificial Sequence:  Hypothetical Probe Sequence
tgcgagccccatggtaagccaatc

SEQ ID NO: 2942 - DNA, 24 bp, Artificial Sequence
  Description of Artificial Sequence:  Hypothetical Probe Sequence
tgcgagccggtatgtcagcctcgt

SEQ ID NO: 2943 - DNA, 24 bp, Artificial Sequence
  Description of Artificial Sequence:  Hypothetical Probe Sequence
tgcgagccaggagatgcgaagacc

SEQ ID NO: 2944 - DNA, 24 bp, Artificial Sequence
  Description of Artificial Sequence:  Hypothetical Probe Sequence
tgcgagcccctatctgagccttga

SEQ ID NO: 2945 - DNA, 24 bp, Artificial Sequence
  Description of Artificial Sequence:  Hypothetical Probe Sequence
tgcgagcctcccgcttgatgctgt

SEQ ID NO: 2946 - DNA, 24 bp, Artificial Sequence
  Description of Artificial Sequence:  Hypothetical Probe Sequence
tgcgagcccacgtgtcgcttctgt

SEQ ID NO: 2947 - DNA, 24 bp, Artificial Sequence
  Description of Artificial Sequence:  Hypothetical Probe Sequence
tgcgagcccagccagcgtctttga

SEQ ID NO: 2948 - DNA, 24 bp, Artificial Sequence
  Description of Artificial Sequence:  Hypothetical Probe Sequence
tgcgagccggactcgtgcttgagt

SEQ ID NO: 2949 - DNA, 24 bp, Artificial Sequence
  Description of Artificial Sequence:  Hypothetical Probe Sequence
tgcgagccacggcagctgatcgtt

SEQ ID NO: 2950 - DNA, 24 bp, Artificial Sequence
  Description of Artificial Sequence:  Hypothetical Probe Sequence
tgcgagccagccgatgggtacacg

SEQ ID NO: 2951 - DNA, 24 bp, Artificial Sequence
  Description of Artificial Sequence:  Hypothetical Probe Sequence
cacgttgaccattgcgccattcgt

SEQ ID NO: 2952 - DNA, 24 bp, Artificial Sequence
  Description of Artificial Sequence:  Hypothetical Probe Sequence
cacgttgagcaaacggaaagtgcg

SEQ ID NO: 2953 - DNA, 24 bp, Artificial Sequence
  Description of Artificial Sequence:  Hypothetical Probe Sequence
cacgttgaatcgcacggaccctca

SEQ ID NO: 2954 - DNA, 24 bp, Artificial Sequence
  Description of Artificial Sequence:  Hypothetical Probe Sequence
cacgtgattcgtgtgccgttcgaa

SEQ ID NO: 2955 - DNA, 24 bp, Artificial Sequence
  Description of Artificial Sequence:  Hypothetical Probe Sequence
cacgtgattcccaatcgcaagcaa

SEQ ID NO: 2956 - DNA, 24 bp, Artificial Sequence
  Description of Artificial Sequence:  Hypothetical Probe Sequence
cacgtgatgtgcccattccccgaa

SEQ ID NO: 2957 - DNA, 24 bp, Artificial Sequence
  Description of Artificial Sequence:  Hypothetical Probe Sequence
cacgttagcacggcaaagtggctt

SEQ ID NO: 2958 - DNA, 24 bp, Artificial Sequence
  Description of Artificial Sequence:  Hypothetical Probe Sequence
cacgaatccacggaccacggagtg

SEQ ID NO: 2959 - DNA, 24 bp, Artificial Sequence
  Description of Artificial Sequence:  Hypothetical Probe Sequence
cacgatacgcaaaaagacgggcaa

SEQ ID NO: 2960 - DNA, 24 bp, Artificial Sequence
  Description of Artificial Sequence:  Hypothetical Probe Sequence
cacgatactgcgtctgacggcgaa

SEQ ID NO: 2961 - DNA, 24 bp, Artificial Sequence
  Description of Artificial Sequence:  Hypothetical Probe Sequence
cacgatacacggacggaggaagcc

SEQ ID NO: 2962 - DNA, 24 bp, Artificial Sequence
  Description of Artificial Sequence:  Hypothetical Probe Sequence
cacgaaagctgtggaccgaagtgc

SEQ ID NO: 2963 - DNA, 24 bp, Artificial Sequence
  Description of Artificial Sequence:  Hypothetical Probe Sequence
cacgaaagggtaatcgcttgtgcg

SEQ ID NO: 2964 - DNA, 24 bp, Artificial Sequence
  Description of Artificial Sequence:  Hypothetical Probe Sequence
cacgaaagcctaagtgcacgcagc

SEQ ID NO: 2965 - DNA, 24 bp, Artificial Sequence
  Description of Artificial Sequence:  Hypothetical Probe Sequence
cacgaaagtgcgatacaccttgcg

SEQ ID NO: 2966 - DNA, 24 bp, Artificial Sequence
  Description of Artificial Sequence:  Hypothetical Probe Sequence
cacgaaaggtgcaaagagccctca

SEQ ID NO: 2967 - DNA, 24 bp, Artificial Sequence
  Description of Artificial Sequence:  Hypothetical Probe Sequence
cacgaaagggacacctgtgctgcg

SEQ ID NO: 2968 - DNA, 24 bp, Artificial Sequence
  Description of Artificial Sequence:  Hypothetical Probe Sequence
cacgtctgcgttatactgcggctt

SEQ ID NO: 2969 - DNA, 24 bp, Artificial Sequence
  Description of Artificial Sequence:  Hypothetical Probe Sequence
cacgtctgtgcgtgatacgggtgc

SEQ ID NO: 2970 - DNA, 24 bp, Artificial Sequence
  Description of Artificial Sequence:  Hypothetical Probe Sequence
cacgtctgcacggcttaaagcacg

SEQ ID NO: 2971 - DNA, 24 bp, Artificial Sequence
  Description of Artificial Sequence:  Hypothetical Probe Sequence
cacgtctgcagcatcgaccttcgt

SEQ ID NO: 2972 - DNA, 24 bp, Artificial Sequence
  Description of Artificial Sequence:  Hypothetical Probe Sequence
cacgtctggacccttggacctgcg

SEQ ID NO: 2973 - DNA, 24 bp, Artificial Sequence
  Description of Artificial Sequence:  Hypothetical Probe Sequence
cacgtgtccgttaggagcaatccc

SEQ ID NO: 2974 - DNA, 24 bp, Artificial Sequence
  Description of Artificial Sequence:  Hypothetical Probe Sequence
cacgtgtcgaccgatggaccggac

SEQ ID NO: 2975 - DNA, 24 bp, Artificial Sequence
  Description of Artificial Sequence:  Hypothetical Probe Sequence
cacgtgtcagccgatggcaacgaa

SEQ ID NO: 2976 - DNA, 24 bp, Artificial Sequence
  Description of Artificial Sequence:  Hypothetical Probe Sequence
cacgtcgttctgcgttacggacgg

SEQ ID NO: 2977 - DNA, 24 bp, Artificial Sequence
  Description of Artificial Sequence:  Hypothetical Probe Sequence
cacgtcgttcgtccatcgaagtgc

SEQ ID NO: 2978 - DNA, 24 bp, Artificial Sequence
  Description of Artificial Sequence:  Hypothetical Probe Sequence
cacgtcgtccataaagagcccacg

SEQ ID NO: 2979 - DNA, 24 bp, Artificial Sequence
  Description of Artificial Sequence:  Hypothetical Probe Sequence
cacgtcgtacctgtcttgcgagcc

SEQ ID NO: 2980 - DNA, 24 bp, Artificial Sequence
  Description of Artificial Sequence:  Hypothetical Probe Sequence
cacgtcgtggacgcaagatgcacg

SEQ ID NO: 2981 - DNA, 24 bp, Artificial Sequence
  Description of Artificial Sequence:  Hypothetical Probe Sequence
cacgcttgtgtcggaccgaaacgg

SEQ ID NO: 2982 - DNA, 24 bp, Artificial Sequence
  Description of Artificial Sequence:  Hypothetical Probe Sequence
cacgcttgagtgagtggtgcggac

SEQ ID NO: 2983 - DNA, 24 bp, Artificial Sequence
  Description of Artificial Sequence:  Hypothetical Probe Sequence
cacgcttgacctcgttagccccat

SEQ ID NO: 2984 - DNA, 24 bp, Artificial Sequence
  Description of Artificial Sequence:  Hypothetical Probe Sequence
cacgcttgtccctcgttgatgcaa

SEQ ID NO: 2985 - DNA, 24 bp, Artificial Sequence
  Description of Artificial Sequence:  Hypothetical Probe Sequence
cacgcttgagcctctgacctgcaa

SEQ ID NO: 2986 - DNA, 24 bp, Artificial Sequence
  Description of Artificial Sequence:  Hypothetical Probe Sequence
cacgcgtttacaaggacacgcacg

SEQ ID NO: 2987 - DNA, 24 bp, Artificial Sequence
  Description of Artificial Sequence:  Hypothetical Probe Sequence
cacgcgtttgtcgcttaatcgtgc

SEQ ID NO: 2988 - DNA, 24 bp, Artificial Sequence
  Description of Artificial Sequence:  Hypothetical Probe Sequence
cacgcgtttcgtgatgcgaattga

SEQ ID NO: 2989 - DNA, 24 bp, Artificial Sequence
  Description of Artificial Sequence:  Hypothetical Probe Sequence
cacgcgttcttgcgttcgtttgat

SEQ ID NO: 2990 - DNA, 24 bp, Artificial Sequence
  Description of Artificial Sequence:  Hypothetical Probe Sequence
cacgcgttcgaagtgcgtctacct

SEQ ID NO: 2991 - DNA, 24 bp, Artificial Sequence
  Description of Artificial Sequence:  Hypothetical Probe Sequence
cacgcgttgtctttagtgcgctca

SEQ ID NO: 2992 - DNA, 24 bp, Artificial Sequence
  Description of Artificial Sequence:  Hypothetical Probe Sequence
cacgcgttgcaagcaatgtcctca

SEQ ID NO: 2993 - DNA, 24 bp, Artificial Sequence
  Description of Artificial Sequence:  Hypothetical Probe Sequence
cacgcgttcctatgatgacccagc

SEQ ID NO: 2994 - DNA, 24 bp, Artificial Sequence
  Description of Artificial Sequence:  Hypothetical Probe Sequence
cacgcgttgatgctcaaggatccc

SEQ ID NO: 2995 - DNA, 24 bp, Artificial Sequence
  Description of Artificial Sequence:  Hypothetical Probe Sequence
cacgcgtttccctgatagcccttg

SEQ ID NO: 2996 - DNA, 24 bp, Artificial Sequence
  Description of Artificial Sequence:  Hypothetical Probe Sequence
cacgcgttagcccacgtccctgat

SEQ ID NO: 2997 - DNA, 24 bp, Artificial Sequence
  Description of Artificial Sequence:  Hypothetical Probe Sequence
cacgctcaaatcagcccacggtgc

SEQ ID NO: 2998 - DNA, 24 bp, Artificial Sequence
  Description of Artificial Sequence:  Hypothetical Probe Sequence
cacgctcacgaaaaagccatgtgc

SEQ ID NO: 2999 - DNA, 24 bp, Artificial Sequence
  Description of Artificial Sequence:  Hypothetical Probe Sequence
cacgctcaggtaatcgatcgcacg

SEQ ID NO: 3000 - DNA, 24 bp, Artificial Sequence
  Description of Artificial Sequence:  Hypothetical Probe Sequence
cacgctcatcccccatccattgat

SEQ ID NO: 3001 - DNA, 24 bp, Artificial Sequence
  Description of Artificial Sequence:  Hypothetical Probe Sequence
cacgctgtatcgacctcagccagc

SEQ ID NO: 3002 - DNA, 24 bp, Artificial Sequence
  Description of Artificial Sequence:  Hypothetical Probe Sequence
cacgctgttgcgctcaaggacgaa

SEQ ID NO: 3003 - DNA, 24 bp, Artificial Sequence
  Description of Artificial Sequence:  Hypothetical Probe Sequence
cacgccattacaacctcagctgcg

SEQ ID NO: 3004 - DNA, 24 bp, Artificial Sequence
  Description of Artificial Sequence:  Hypothetical Probe Sequence
cacgccattctgcttggtgcagga

SEQ ID NO: 3005 - DNA, 24 bp, Artificial Sequence
  Description of Artificial Sequence:  Hypothetical Probe Sequence
cacgccattcgttctgggacagga

SEQ ID NO: 3006 - DNA, 24 bp, Artificial Sequence
  Description of Artificial Sequence:  Hypothetical Probe Sequence
cacgccatcttgaatccacgccta

SEQ ID NO: 3007 - DNA, 24 bp, Artificial Sequence
  Description of Artificial Sequence:  Hypothetical Probe Sequence
cacgccatccatcgttggtacgtt

SEQ ID NO: 3008 - DNA, 24 bp, Artificial Sequence
  Description of Artificial Sequence:  Hypothetical Probe Sequence
cacgccatggtaaggaacggacct

SEQ ID NO: 3009 - DNA, 24 bp, Artificial Sequence
  Description of Artificial Sequence:  Hypothetical Probe Sequence
cacgccatgtctcagctgtcgcaa

SEQ ID NO: 3010 - DNA, 24 bp, Artificial Sequence
  Description of Artificial Sequence:  Hypothetical Probe Sequence
cacgccatgagtgtgcgcttctgt

SEQ ID NO: 3011 - DNA, 24 bp, Artificial Sequence
  Description of Artificial Sequence:  Hypothetical Probe Sequence
cacgccatagtgtgtctcccgacc

SEQ ID NO: 3012 - DNA, 24 bp, Artificial Sequence
  Description of Artificial Sequence:  Hypothetical Probe Sequence
cacgccataggacgttacggtcgt

SEQ ID NO: 3013 - DNA, 24 bp, Artificial Sequence
  Description of Artificial Sequence:  Hypothetical Probe Sequence
cacgccattgcggcttcagctgtc

SEQ ID NO: 3014 - DNA, 24 bp, Artificial Sequence
  Description of Artificial Sequence:  Hypothetical Probe Sequence
cacgccatcacgctcaggactccc

SEQ ID NO: 3015 - DNA, 24 bp, Artificial Sequence
  Description of Artificial Sequence:  Hypothetical Probe Sequence
cacgccatgacctacatgcgccta

SEQ ID NO: 3016 - DNA, 24 bp, Artificial Sequence
  Description of Artificial Sequence:  Hypothetical Probe Sequence
cacgccatacggagtgagccaaag

SEQ ID NO: 3017 - DNA, 24 bp, Artificial Sequence
  Description of Artificial Sequence:  Hypothetical Probe Sequence
cacgcgaattgacgttgcttcagc

SEQ ID NO: 3018 - DNA, 24 bp, Artificial Sequence
  Description of Artificial Sequence:  Hypothetical Probe Sequence
cacgcgaaaatcgagtcacggctt

SEQ ID NO: 3019 - DNA, 24 bp, Artificial Sequence
  Description of Artificial Sequence:  Hypothetical Probe Sequence
cacgcgaatctgaatccttgcagc

SEQ ID NO: 3020 - DNA, 24 bp, Artificial Sequence
  Description of Artificial Sequence:  Hypothetical Probe Sequence
cacgcgaacttgttgaggacgctt

SEQ ID NO: 3021 - DNA, 24 bp, Artificial Sequence
  Description of Artificial Sequence:  Hypothetical Probe Sequence
cacgcgaactgtcagccctatccc

SEQ ID NO: 3022 - DNA, 24 bp, Artificial Sequence
  Description of Artificial Sequence:  Hypothetical Probe Sequence
cacgcgaagcttccattcgtctgt

SEQ ID NO: 3023 - DNA, 24 bp, Artificial Sequence
  Description of Artificial Sequence:  Hypothetical Probe Sequence
cacgcgaaggtactcatcccgtct

SEQ ID NO: 3024 - DNA, 24 bp, Artificial Sequence
  Description of Artificial Sequence:  Hypothetical Probe Sequence
cacgcgaagtcttcccgatgtctg

SEQ ID NO: 3025 - DNA, 24 bp, Artificial Sequence
  Description of Artificial Sequence:  Hypothetical Probe Sequence
cacgcgaagcaacgaaatacccat

SEQ ID NO: 3026 - DNA, 24 bp, Artificial Sequence
  Description of Artificial Sequence:  Hypothetical Probe Sequence
cacgcgaagatgttagagccgacc

SEQ ID NO: 3027 - DNA, 24 bp, Artificial Sequence
  Description of Artificial Sequence:  Hypothetical Probe Sequence
cacgcgaatcccggtacgaacgtt

SEQ ID NO: 3028 - DNA, 24 bp, Artificial Sequence
  Description of Artificial Sequence:  Hypothetical Probe Sequence
cacgcgaatgcggatgcttggatg

SEQ ID NO: 3029 - DNA, 24 bp, Artificial Sequence
  Description of Artificial Sequence:  Hypothetical Probe Sequence
cacggcttttagtgatggactgcg

SEQ ID NO: 3030 - DNA, 24 bp, Artificial Sequence
  Description of Artificial Sequence:  Hypothetical Probe Sequence
cacggctttcgtgtctgcttcacg

SEQ ID NO: 3031 - DNA, 24 bp, Artificial Sequence
  Description of Artificial Sequence:  Hypothetical Probe Sequence
cacggcttgcaagcaactgtgtgc

SEQ ID NO: 3032 - DNA, 24 bp, Artificial Sequence
  Description of Artificial Sequence:  Hypothetical Probe Sequence
cacggcttatcggtgcgctttctg

SEQ ID NO: 3033 - DNA, 24 bp, Artificial Sequence
  Description of Artificial Sequence:  Hypothetical Probe Sequence
cacggctttcccgtgcctgtcttg

SEQ ID NO: 3034 - DNA, 24 bp, Artificial Sequence
  Description of Artificial Sequence:  Hypothetical Probe Sequence
cacggcttggacctgttgtcgctt

SEQ ID NO: 3035 - DNA, 24 bp, Artificial Sequence
  Description of Artificial Sequence:  Hypothetical Probe Sequence
cacggcttagccccataggatccc

SEQ ID NO: 3036 - DNA, 24 bp, Artificial Sequence
  Description of Artificial Sequence:  Hypothetical Probe Sequence
cacgggtatgatcagcgatgcacg

SEQ ID NO: 3037 - DNA, 24 bp, Artificial Sequence
  Description of Artificial Sequence:  Hypothetical Probe Sequence
cacgggtatcgtgcttcagcggta

SEQ ID NO: 3038 - DNA, 24 bp, Artificial Sequence
  Description of Artificial Sequence:  Hypothetical Probe Sequence
cacgggtaccatgtctgtgcgtgc

SEQ ID NO: 3039 - DNA, 24 bp, Artificial Sequence
  Description of Artificial Sequence:  Hypothetical Probe Sequence
cacgggtagcttaaagtcccgtgc

SEQ ID NO: 3040 - DNA, 24 bp, Artificial Sequence
  Description of Artificial Sequence:  Hypothetical Probe Sequence
cacgggtagcaaagtgatcgtccc

SEQ ID NO: 3041 - DNA, 24 bp, Artificial Sequence
  Description of Artificial Sequence:  Hypothetical Probe Sequence
cacgggtaaggacacgtcgtcgtt

SEQ ID NO: 3042 - DNA, 24 bp, Artificial Sequence
  Description of Artificial Sequence:  Hypothetical Probe Sequence
cacgggtagatgtgcgtccctgcg

SEQ ID NO: 3043 - DNA, 24 bp, Artificial Sequence
  Description of Artificial Sequence:  Hypothetical Probe Sequence
cacgggtagaccagccgcaatcgt

SEQ ID NO: 3044 - DNA, 24 bp, Artificial Sequence
  Description of Artificial Sequence:  Hypothetical Probe Sequence
cacgggtaggacaaagggacggta

SEQ ID NO: 3045 - DNA, 24 bp, Artificial Sequence
  Description of Artificial Sequence:  Hypothetical Probe Sequence
cacggtcttgatcacggcaagtgc

SEQ ID NO: 3046 - DNA, 24 bp, Artificial Sequence
  Description of Artificial Sequence:  Hypothetical Probe Sequence
cacggtcttctgtgcgccattgtc

SEQ ID NO: 3047 - DNA, 24 bp, Artificial Sequence
  Description of Artificial Sequence:  Hypothetical Probe Sequence
cacggtctgcaaggtatcccagcc

SEQ ID NO: 3048 - DNA, 24 bp, Artificial Sequence
  Description of Artificial Sequence:  Hypothetical Probe Sequence
cacggtcttgcgcacgacctccta

SEQ ID NO: 3049 - DNA, 24 bp, Artificial Sequence
  Description of Artificial Sequence:  Hypothetical Probe Sequence
cacggtctacggttgaagccctgt

SEQ ID NO: 3050 - DNA, 24 bp, Artificial Sequence
  Description of Artificial Sequence:  Hypothetical Probe Sequence
cacggagttgatcagctgcggcaa

SEQ ID NO: 3051 - DNA, 24 bp, Artificial Sequence
  Description of Artificial Sequence:  Hypothetical Probe Sequence
cacggagttcgtttagcagcccat

SEQ ID NO: 3052 - DNA, 24 bp, Artificial Sequence
  Description of Artificial Sequence:  Hypothetical Probe Sequence
cacggagtgcttacggcacgatac

SEQ ID NO: 3053 - DNA, 24 bp, Artificial Sequence
  Description of Artificial Sequence:  Hypothetical Probe Sequence
cacggagtaggagaccgtgcgctt

SEQ ID NO: 3054 - DNA, 24 bp, Artificial Sequence
  Description of Artificial Sequence:  Hypothetical Probe Sequence
cacggagtagccggaccagcgagt

SEQ ID NO: 3055 - DNA, 24 bp, Artificial Sequence
  Description of Artificial Sequence:  Hypothetical Probe Sequence
cacggcaattgatctgcctacacg

SEQ ID NO: 3056 - DNA, 24 bp, Artificial Sequence
  Description of Artificial Sequence:  Hypothetical Probe Sequence
cacggcaatgtcacggaaagtcgt

SEQ ID NO: 3057 - DNA, 24 bp, Artificial Sequence
  Description of Artificial Sequence:  Hypothetical Probe Sequence
cacggcaacttgaatcatcggacc

SEQ ID NO: 3058 - DNA, 24 bp, Artificial Sequence
  Description of Artificial Sequence:  Hypothetical Probe Sequence
cacggcaaggtactcagacctccc

SEQ ID NO: 3059 - DNA, 24 bp, Artificial Sequence
  Description of Artificial Sequence:  Hypothetical Probe Sequence
cacggcaacctaaggaatcgctca

SEQ ID NO: 3060 - DNA, 24 bp, Artificial Sequence
  Description of Artificial Sequence:  Hypothetical Probe Sequence
cacggcaagatgttgagacccgaa

SEQ ID NO: 3061 - DNA, 24 bp, Artificial Sequence
  Description of Artificial Sequence:  Hypothetical Probe Sequence
cacggcaatccccctacgaaacct

SEQ ID NO: 3062 - DNA, 24 bp, Artificial Sequence
  Description of Artificial Sequence:  Hypothetical Probe Sequence
cacggcaatgcgtctgcacgtgat

SEQ ID NO: 3063 - DNA, 24 bp, Artificial Sequence
  Description of Artificial Sequence:  Hypothetical Probe Sequence
cacggcaacacggtgcatcgtctg

SEQ ID NO: 3064 - DNA, 24 bp, Artificial Sequence
  Description of Artificial Sequence:  Hypothetical Probe Sequence
cacgagtggcttatcgcgttagcc

SEQ ID NO: 3065 - DNA, 24 bp, Artificial Sequence
  Description of Artificial Sequence:  Hypothetical Probe Sequence
cacgagtggatgaggatgcgcagc

SEQ ID NO: 3066 - DNA, 24 bp, Artificial Sequence
  Description of Artificial Sequence:  Hypothetical Probe Sequence
cacgagtgtcccgcaaccattccc

SEQ ID NO: 3067 - DNA, 24 bp, Artificial Sequence
  Description of Artificial Sequence:  Hypothetical Probe Sequence
cacgagtggaccaatccagccacg

SEQ ID NO: 3068 - DNA, 24 bp, Artificial Sequence
  Description of Artificial Sequence:  Hypothetical Probe Sequence
cacgaccttgatggaccgaatccc

SEQ ID NO: 3069 - DNA, 24 bp, Artificial Sequence
  Description of Artificial Sequence:  Hypothetical Probe Sequence
cacgaccttctgcgaaacggcagc

SEQ ID NO: 3070 - DNA, 24 bp, Artificial Sequence
  Description of Artificial Sequence:  Hypothetical Probe Sequence
cacgaccttcgtgcaaagccagtg

SEQ ID NO: 3071 - DNA, 24 bp, Artificial Sequence
  Description of Artificial Sequence:  Hypothetical Probe Sequence
cacgacctccatatcggaccgtgc

SEQ ID NO: 3072 - DNA, 24 bp, Artificial Sequence
  Description of Artificial Sequence:  Hypothetical Probe Sequence
cacgacctatcgtgcgtgcgggac

SEQ ID NO: 3073 - DNA, 24 bp, Artificial Sequence
  Description of Artificial Sequence:  Hypothetical Probe Sequence
cacgacctgatgtgcggacccttg

SEQ ID NO: 3074 - DNA, 24 bp, Artificial Sequence
  Description of Artificial Sequence:  Hypothetical Probe Sequence
cacgacctggacggtacacgcagc

SEQ ID NO: 3075 - DNA, 24 bp, Artificial Sequence
  Description of Artificial Sequence:  Hypothetical Probe Sequence
cacgatcgaatcacgggaccgtct

SEQ ID NO: 3076 - DNA, 24 bp, Artificial Sequence
  Description of Artificial Sequence:  Hypothetical Probe Sequence
cacgatcgctgtagtgatcgccat

SEQ ID NO: 3077 - DNA, 24 bp, Artificial Sequence
  Description of Artificial Sequence:  Hypothetical Probe Sequence
cacgatcgggtatacaacggtccc

SEQ ID NO: 3078 - DNA, 24 bp, Artificial Sequence
  Description of Artificial Sequence:  Hypothetical Probe Sequence
cacgatcggtctcttgtccccgaa

SEQ ID NO: 3079 - DNA, 24 bp, Artificial Sequence
  Description of Artificial Sequence:  Hypothetical Probe Sequence
cacgatcgagtgccatcagcgcaa

SEQ ID NO: 3080 - DNA, 24 bp, Artificial Sequence
  Description of Artificial Sequence:  Hypothetical Probe Sequence
cacgatcgacctcgaaacggtgtc

SEQ ID NO: 3081 - DNA, 24 bp, Artificial Sequence
  Description of Artificial Sequence:  Hypothetical Probe Sequence
cacgatcgagccgatgagccacct

SEQ ID NO: 3082 - DNA, 24 bp, Artificial Sequence
  Description of Artificial Sequence:  Hypothetical Probe Sequence
cacgaggaaaaggcaatcccgagt

SEQ ID NO: 3083 - DNA, 24 bp, Artificial Sequence
  Description of Artificial Sequence:  Hypothetical Probe Sequence
cacgaggatcgtcttgacggctgt

SEQ ID NO: 3084 - DNA, 24 bp, Artificial Sequence
  Description of Artificial Sequence:  Hypothetical Probe Sequence
cacgaggacttgtgcgctcagacc

SEQ ID NO: 3085 - DNA, 24 bp, Artificial Sequence
  Description of Artificial Sequence:  Hypothetical Probe Sequence
cacgaggaccattccccagcgacc

SEQ ID NO: 3086 - DNA, 24 bp, Artificial Sequence
  Description of Artificial Sequence:  Hypothetical Probe Sequence
cacgaggaaccttgcgaaagctgt

SEQ ID NO: 3087 - DNA, 24 bp, Artificial Sequence
  Description of Artificial Sequence:  Hypothetical Probe Sequence
cacgaggacacggcttctcaagcc

SEQ ID NO: 3088 - DNA, 24 bp, Artificial Sequence
  Description of Artificial Sequence:  Hypothetical Probe Sequence
cacgaggacagcgcttcagctccc

SEQ ID NO: 3089 - DNA, 24 bp, Artificial Sequence
  Description of Artificial Sequence:  Hypothetical Probe Sequence
cacgaggaggacagtggacccgtt

SEQ ID NO: 3090 - DNA, 24 bp, Artificial Sequence
  Description of Artificial Sequence:  Hypothetical Probe Sequence
cacgaggaagccttgaacggtcgt

SEQ ID NO: 3091 - DNA, 24 bp, Artificial Sequence
  Description of Artificial Sequence:  Hypothetical Probe Sequence
cacgcctaaatcgaccatcggtgc

SEQ ID NO: 3092 - DNA, 24 bp, Artificial Sequence
  Description of Artificial Sequence:  Hypothetical Probe Sequence
cacgcctagcttcgttagcctcgt

SEQ ID NO: 3093 - DNA, 24 bp, Artificial Sequence
  Description of Artificial Sequence:  Hypothetical Probe Sequence
cacgcctaatcgtgcgtctgctgt

SEQ ID NO: 3094 - DNA, 24 bp, Artificial Sequence
  Description of Artificial Sequence:  Hypothetical Probe Sequence
cacgcctagatgggtacagcgtgc

SEQ ID NO: 3095 - DNA, 24 bp, Artificial Sequence
  Description of Artificial Sequence:  Hypothetical Probe Sequence
cacggatgtcgtcttgggacgctt

SEQ ID NO: 3096 - DNA, 24 bp, Artificial Sequence
  Description of Artificial Sequence:  Hypothetical Probe Sequence
cacggatgcttgtcccccattgat

SEQ ID NO: 3097 - DNA, 24 bp, Artificial Sequence
  Description of Artificial Sequence:  Hypothetical Probe Sequence
cacggatgctcagctttgtcccat

SEQ ID NO: 3098 - DNA, 24 bp, Artificial Sequence
  Description of Artificial Sequence:  Hypothetical Probe Sequence
cacggatgggtatcgtagccctgt

SEQ ID NO: 3099 - DNA, 24 bp, Artificial Sequence
  Description of Artificial Sequence:  Hypothetical Probe Sequence
cacggatggagtcagccctaagcc

SEQ ID NO: 3100 - DNA, 24 bp, Artificial Sequence
  Description of Artificial Sequence:  Hypothetical Probe Sequence
cacggatgcagcgaccagtgggac

SEQ ID NO: 3101 - DNA, 24 bp, Artificial Sequence
  Description of Artificial Sequence:  Hypothetical Probe Sequence
cacggatggtgccgttcacgtgtc

SEQ ID NO: 3102 - DNA, 24 bp, Artificial Sequence
  Description of Artificial Sequence:  Hypothetical Probe Sequence
cacgtcccaatcgtgcgcaatctg

SEQ ID NO: 3103 - DNA, 24 bp, Artificial Sequence
  Description of Artificial Sequence:  Hypothetical Probe Sequence
cacgtccctctggtgcagccacct

SEQ ID NO: 3104 - DNA, 24 bp, Artificial Sequence
  Description of Artificial Sequence:  Hypothetical Probe Sequence
cacgtcccgcttggtaggtagacc

SEQ ID NO: 3105 - DNA, 24 bp, Artificial Sequence
  Description of Artificial Sequence:  Hypothetical Probe Sequence
cacgtcccggtagcttgatgggac

SEQ ID NO: 3106 - DNA, 24 bp, Artificial Sequence
  Description of Artificial Sequence:  Hypothetical Probe Sequence
cacgtccctgcgggtacttgccat

SEQ ID NO: 3107 - DNA, 24 bp, Artificial Sequence
  Description of Artificial Sequence:  Hypothetical Probe Sequence
cacgtcccacggtgatctcaatcg

SEQ ID NO: 3108 - DNA, 24 bp, Artificial Sequence
  Description of Artificial Sequence:  Hypothetical Probe Sequence
cacgtgcgttgaagtgcgttgacc

SEQ ID NO: 3109 - DNA, 24 bp, Artificial Sequence
  Description of Artificial Sequence:  Hypothetical Probe Sequence
cacgtgcgatacacggggacgagt

SEQ ID NO: 3110 - DNA, 24 bp, Artificial Sequence
  Description of Artificial Sequence:  Hypothetical Probe Sequence
cacgtgcgtacatcccaggacgaa

SEQ ID NO: 3111 - DNA, 24 bp, Artificial Sequence
  Description of Artificial Sequence:  Hypothetical Probe Sequence
cacgtgcgtctgcgtttctgcagc

SEQ ID NO: 3112 - DNA, 24 bp, Artificial Sequence
  Description of Artificial Sequence:  Hypothetical Probe Sequence
cacgtgcgtgtctcgttcgtccta

SEQ ID NO: 3113 - DNA, 24 bp, Artificial Sequence
  Description of Artificial Sequence:  Hypothetical Probe Sequence
cacgtgcggcttcctatctggtgc

SEQ ID NO: 3114 - DNA, 24 bp, Artificial Sequence
  Description of Artificial Sequence:  Hypothetical Probe Sequence
cacgtgcgggtaagtgcacgagtg

SEQ ID NO: 3115 - DNA, 24 bp, Artificial Sequence
  Description of Artificial Sequence:  Hypothetical Probe Sequence
cacgtgcggagtcgttgagtcacg

SEQ ID NO: 3116 - DNA, 24 bp, Artificial Sequence
  Description of Artificial Sequence:  Hypothetical Probe Sequence
cacgtgcggcaaggtacagccttg

SEQ ID NO: 3117 - DNA, 24 bp, Artificial Sequence
  Description of Artificial Sequence:  Hypothetical Probe Sequence
cacgtgcgagtgccatgacccttg

SEQ ID NO: 3118 - DNA, 24 bp, Artificial Sequence
  Description of Artificial Sequence:  Hypothetical Probe Sequence
cacgtgcgatcgaaagagcctcgt

SEQ ID NO: 3119 - DNA, 24 bp, Artificial Sequence
  Description of Artificial Sequence:  Hypothetical Probe Sequence
cacgtgcgcctactgtgaccacgg

SEQ ID NO: 3120 - DNA, 24 bp, Artificial Sequence
  Description of Artificial Sequence:  Hypothetical Probe Sequence
cacgtgcgtgcggcaatacatgcg

SEQ ID NO: 3121 - DNA, 24 bp, Artificial Sequence
  Description of Artificial Sequence:  Hypothetical Probe Sequence
cacgtgcgacggcctaaaagtccc

SEQ ID NO: 3122 - DNA, 24 bp, Artificial Sequence
  Description of Artificial Sequence:  Hypothetical Probe Sequence
cacgcacgttgaaatctcccctgt

SEQ ID NO: 3123 - DNA, 24 bp, Artificial Sequence
  Description of Artificial Sequence:  Hypothetical Probe Sequence
cacgcacgtctggcttcagcgtct

SEQ ID NO: 3124 - DNA, 24 bp, Artificial Sequence
  Description of Artificial Sequence:  Hypothetical Probe Sequence
cacgcacgtcgtctcatgcggagt

SEQ ID NO: 3125 - DNA, 24 bp, Artificial Sequence
  Description of Artificial Sequence:  Hypothetical Probe Sequence
cacgcacgccataaagaaaggctt

SEQ ID NO: 3126 - DNA, 24 bp, Artificial Sequence
  Description of Artificial Sequence:  Hypothetical Probe Sequence
cacgcacggtcttacacgtttgcg

SEQ ID NO: 3127 - DNA, 24 bp, Artificial Sequence
  Description of Artificial Sequence:  Hypothetical Probe Sequence
cacgcacgatcgcagcaatcagga

SEQ ID NO: 3128 - DNA, 24 bp, Artificial Sequence
  Description of Artificial Sequence:  Hypothetical Probe Sequence
cacgcacgcagccgaagagtcagc

SEQ ID NO: 3129 - DNA, 24 bp, Artificial Sequence
  Description of Artificial Sequence:  Hypothetical Probe Sequence
cacgcacggaccgaccgtctttga

SEQ ID NO: 3130 - DNA, 24 bp, Artificial Sequence
  Description of Artificial Sequence:  Hypothetical Probe Sequence
cacgcagcttagcacggtgcgacc

SEQ ID NO: 3131 - DNA, 24 bp, Artificial Sequence
  Description of Artificial Sequence:  Hypothetical Probe Sequence
cacgcagctctgcagcccatggta

SEQ ID NO: 3132 - DNA, 24 bp, Artificial Sequence
  Description of Artificial Sequence:  Hypothetical Probe Sequence
cacgcagccttgggtaaaagagcc

SEQ ID NO: 3133 - DNA, 24 bp, Artificial Sequence
  Description of Artificial Sequence:  Hypothetical Probe Sequence
cacgcagcctcaacggacggatac

SEQ ID NO: 3134 - DNA, 24 bp, Artificial Sequence
  Description of Artificial Sequence:  Hypothetical Probe Sequence
cacgcagcggtacgttatcgctca

SEQ ID NO: 3135 - DNA, 24 bp, Artificial Sequence
  Description of Artificial Sequence:  Hypothetical Probe Sequence
cacgcagcgtctgagttcccctca

SEQ ID NO: 3136 - DNA, 24 bp, Artificial Sequence
  Description of Artificial Sequence:  Hypothetical Probe Sequence
cacgcagcacctttgatcgtacgg

SEQ ID NO: 3137 - DNA, 24 bp, Artificial Sequence
  Description of Artificial Sequence:  Hypothetical Probe Sequence
cacgcagcatcgcctagaccccta

SEQ ID NO: 3138 - DNA, 24 bp, Artificial Sequence
  Description of Artificial Sequence:  Hypothetical Probe Sequence
cacgcagcgatgggtagaccgatg

SEQ ID NO: 3139 - DNA, 24 bp, Artificial Sequence
  Description of Artificial Sequence:  Hypothetical Probe Sequence
cacgcagctccccttggtgcagtg

SEQ ID NO: 3140 - DNA, 24 bp, Artificial Sequence
  Description of Artificial Sequence:  Hypothetical Probe Sequence
cacggaccaatctgcgacctacgg

SEQ ID NO: 3141 - DNA, 24 bp, Artificial Sequence
  Description of Artificial Sequence:  Hypothetical Probe Sequence
cacggacctctgcgttcacgatcg

SEQ ID NO: 3142 - DNA, 24 bp, Artificial Sequence
  Description of Artificial Sequence:  Hypothetical Probe Sequence
cacggaccccatgatggtgcgtct

SEQ ID NO: 3143 - DNA, 24 bp, Artificial Sequence
  Description of Artificial Sequence:  Hypothetical Probe Sequence
cacggaccgcaatcgtcttggatg

SEQ ID NO: 3144 - DNA, 24 bp, Artificial Sequence
  Description of Artificial Sequence:  Hypothetical Probe Sequence
cacggaccatcgaatccgaatgtc

SEQ ID NO: 3145 - DNA, 24 bp, Artificial Sequence
  Description of Artificial Sequence:  Hypothetical Probe Sequence
cacggaccaggaggtatgtctgcg

SEQ ID NO: 3146 - DNA, 24 bp, Artificial Sequence
  Description of Artificial Sequence:  Hypothetical Probe Sequence
cacggaccgatgttagccatcgaa

SEQ ID NO: 3147 - DNA, 24 bp, Artificial Sequence
  Description of Artificial Sequence:  Hypothetical Probe Sequence
cacggtgcttagacgggtgccttg

SEQ ID NO: 3148 - DNA, 24 bp, Artificial Sequence
  Description of Artificial Sequence:  Hypothetical Probe Sequence
cacggtgcaatcccatcacgctgt

SEQ ID NO: 3149 - DNA, 24 bp, Artificial Sequence
  Description of Artificial Sequence:  Hypothetical Probe Sequence
cacggtgcaaagaaagcagcccta

SEQ ID NO: 3150 - DNA, 24 bp, Artificial Sequence
  Description of Artificial Sequence:  Hypothetical Probe Sequence
cacggtgctctgcttgcgaaccat

SEQ ID NO: 3151 - DNA, 24 bp, Artificial Sequence
  Description of Artificial Sequence:  Hypothetical Probe Sequence
cacggtgccttgcgaactcacacg

SEQ ID NO: 3152 - DNA, 24 bp, Artificial Sequence
  Description of Artificial Sequence:  Hypothetical Probe Sequence
cacggtgcctcaacctctcaacgg

SEQ ID NO: 3153 - DNA, 24 bp, Artificial Sequence
  Description of Artificial Sequence:  Hypothetical Probe Sequence
cacggtgccgaaaggagaccacct

SEQ ID NO: 3154 - DNA, 24 bp, Artificial Sequence
  Description of Artificial Sequence:  Hypothetical Probe Sequence
cacggtgcgagtgcaaagccttag

SEQ ID NO: 3155 - DNA, 24 bp, Artificial Sequence
  Description of Artificial Sequence:  Hypothetical Probe Sequence
cacggtgcacctaggagcaagtgc

SEQ ID NO: 3156 - DNA, 24 bp, Artificial Sequence
  Description of Artificial Sequence:  Hypothetical Probe Sequence
cacggtgcaggaatcgaggaggac

SEQ ID NO: 3157 - DNA, 24 bp, Artificial Sequence
  Description of Artificial Sequence:  Hypothetical Probe Sequence
cacggtgccctaacctcctatccc

SEQ ID NO: 3158 - DNA, 24 bp, Artificial Sequence
  Description of Artificial Sequence:  Hypothetical Probe Sequence
cacggtgctccccagcctgtgatg

SEQ ID NO: 3159 - DNA, 24 bp, Artificial Sequence
  Description of Artificial Sequence:  Hypothetical Probe Sequence
cacggtgctgcgtgatgtgcagga

SEQ ID NO: 3160 - DNA, 24 bp, Artificial Sequence
  Description of Artificial Sequence:  Hypothetical Probe Sequence
cacggtgcggacgtgcagcctgat

SEQ ID NO: 3161 - DNA, 24 bp, Artificial Sequence
  Description of Artificial Sequence:  Hypothetical Probe Sequence
cacgggacttgagcttcgtttgcg

SEQ ID NO: 3162 - DNA, 24 bp, Artificial Sequence
  Description of Artificial Sequence:  Hypothetical Probe Sequence
cacgggacaatcttgaagccgagt

SEQ ID NO: 3163 - DNA, 24 bp, Artificial Sequence
  Description of Artificial Sequence:  Hypothetical Probe Sequence
cacgggacatacagccaccttccc

SEQ ID NO: 3164 - DNA, 24 bp, Artificial Sequence
  Description of Artificial Sequence:  Hypothetical Probe Sequence
cacgggacctcactcagcttgtgc

SEQ ID NO: 3165 - DNA, 24 bp, Artificial Sequence
  Description of Artificial Sequence:  Hypothetical Probe Sequence
cacgggacctgtcttgagtgcacg

SEQ ID NO: 3166 - DNA, 24 bp, Artificial Sequence
  Description of Artificial Sequence:  Hypothetical Probe Sequence
cacgggacgagtttgaatcgatcg

SEQ ID NO: 3167 - DNA, 24 bp, Artificial Sequence
  Description of Artificial Sequence:  Hypothetical Probe Sequence
cacgggaccctagtgcggacaatc

SEQ ID NO: 3168 - DNA, 24 bp, Artificial Sequence
  Description of Artificial Sequence:  Hypothetical Probe Sequence
cacgggacgaccacggtgatggta

SEQ ID NO: 3169 - DNA, 24 bp, Artificial Sequence
  Description of Artificial Sequence:  Hypothetical Probe Sequence
cacgacggaatctcgttgattccc

SEQ ID NO: 3170 - DNA, 24 bp, Artificial Sequence
  Description of Artificial Sequence:  Hypothetical Probe Sequence
cacgacggtacaagcccagcttga

SEQ ID NO: 3171 - DNA, 24 bp, Artificial Sequence
  Description of Artificial Sequence:  Hypothetical Probe Sequence
cacgacggtgtcgtgcgtgcaatc

SEQ ID NO: 3172 - DNA, 24 bp, Artificial Sequence
  Description of Artificial Sequence:  Hypothetical Probe Sequence
cacgacggagtgcttgttgatgcg

SEQ ID NO: 3173 - DNA, 24 bp, Artificial Sequence
  Description of Artificial Sequence:  Hypothetical Probe Sequence
cacgacggatcgcgtttcgtctca

SEQ ID NO: 3174 - DNA, 24 bp, Artificial Sequence
  Description of Artificial Sequence:  Hypothetical Probe Sequence
cacgacggcagctctggcttctca

SEQ ID NO: 3175 - DNA, 24 bp, Artificial Sequence
  Description of Artificial Sequence:  Hypothetical Probe Sequence
cacgacggggacaggaaatccttg

SEQ ID NO: 3176 - DNA, 24 bp, Artificial Sequence
  Description of Artificial Sequence:  Hypothetical Probe Sequence
cacgagccaaagtgcggagtgtct

SEQ ID NO: 3177 - DNA, 24 bp, Artificial Sequence
  Description of Artificial Sequence:  Hypothetical Probe Sequence
cacgagcctacaacggtgcgaaag

SEQ ID NO: 3178 - DNA, 24 bp, Artificial Sequence
  Description of Artificial Sequence:  Hypothetical Probe Sequence
cacgagcctctgaatcgcttcacg

SEQ ID NO: 3179 - DNA, 24 bp, Artificial Sequence
  Description of Artificial Sequence:  Hypothetical Probe Sequence
cacgagcctgtcagcccctattga

SEQ ID NO: 3180 - DNA, 24 bp, Artificial Sequence
  Description of Artificial Sequence:  Hypothetical Probe Sequence
cacgagccctcacgttggacgtct

SEQ ID NO: 3181 - DNA, 24 bp, Artificial Sequence
  Description of Artificial Sequence:  Hypothetical Probe Sequence
cacgagccgcttacctaggaatcg

SEQ ID NO: 3182 - DNA, 24 bp, Artificial Sequence
  Description of Artificial Sequence:  Hypothetical Probe Sequence
cacgagccagtgcgttagcccttg

SEQ ID NO: 3183 - DNA, 24 bp, Artificial Sequence
  Description of Artificial Sequence:  Hypothetical Probe Sequence
cacgagccacctcagcagtgcagc

SEQ ID NO: 3184 - DNA, 24 bp, Artificial Sequence
  Description of Artificial Sequence:  Hypothetical Probe Sequence
cacgagcctgcggaccggactgat

SEQ ID NO: 3185 - DNA, 24 bp, Artificial Sequence
  Description of Artificial Sequence:  Hypothetical Probe Sequence
cacgagcccacggcaacagctctg

SEQ ID NO: 3186 - DNA, 24 bp, Artificial Sequence
  Description of Artificial Sequence:  Hypothetical Probe Sequence
cacgagccgtgcgagtcttgtgcg

SEQ ID NO: 3187 - DNA, 24 bp, Artificial Sequence
  Description of Artificial Sequence:  Hypothetical Probe Sequence
cacgagccggacctcatcgtcagc

SEQ ID NO: 3188 - DNA, 24 bp, Artificial Sequence
  Description of Artificial Sequence:  Hypothetical Probe Sequence
cagcttgagtgccgaaagccggac

SEQ ID NO: 3189 - DNA, 24 bp, Artificial Sequence
  Description of Artificial Sequence:  Hypothetical Probe Sequence
cagctgatgcttggacagcccagc

SEQ ID NO: 3190 - DNA, 24 bp, Artificial Sequence
  Description of Artificial Sequence:  Hypothetical Probe Sequence
cagctgatgcaacacgcttggtgc

SEQ ID NO: 3191 - DNA, 24 bp, Artificial Sequence
  Description of Artificial Sequence:  Hypothetical Probe Sequence
cagctgattcccagtgcacggtgc

SEQ ID NO: 3192 - DNA, 24 bp, Artificial Sequence
  Description of Artificial Sequence:  Hypothetical Probe Sequence
cagcaatctcgtacggcacgcgtt

SEQ ID NO: 3193 - DNA, 24 bp, Artificial Sequence
  Description of Artificial Sequence:  Hypothetical Probe Sequence
cagcaatcctcacgttagccgtgc

SEQ ID NO: 3194 - DNA, 24 bp, Artificial Sequence
  Description of Artificial Sequence:  Hypothetical Probe Sequence
cagcaatcggtaacggcttgctgt

SEQ ID NO: 3195 - DNA, 24 bp, Artificial Sequence
  Description of Artificial Sequence:  Hypothetical Probe Sequence
cagcaatcgtcttccccagctccc

SEQ ID NO: 3196 - DNA, 24 bp, Artificial Sequence
  Description of Artificial Sequence:  Hypothetical Probe Sequence
cagcaatcatcgaaagcacgcttg

SEQ ID NO: 3197 - DNA, 24 bp, Artificial Sequence
  Description of Artificial Sequence:  Hypothetical Probe Sequence
cagcatactcccacggacggcgaa

SEQ ID NO: 3198 - DNA, 24 bp, Artificial Sequence
  Description of Artificial Sequence:  Hypothetical Probe Sequence
cagcatactgcgcacgtgcgtccc

SEQ ID NO: 3199 - DNA, 24 bp, Artificial Sequence
  Description of Artificial Sequence:  Hypothetical Probe Sequence
cagcaaaggtgcgtctagccagcc

SEQ ID NO: 3200 - DNA, 24 bp, Artificial Sequence
  Description of Artificial Sequence:  Hypothetical Probe Sequence
cagcaaagacggcacgagtgagcc

SEQ ID NO: 3201 - DNA, 24 bp, Artificial Sequence
  Description of Artificial Sequence:  Hypothetical Probe Sequence
cagctctggatgagccacggcacg

SEQ ID NO: 3202 - DNA, 24 bp, Artificial Sequence
  Description of Artificial Sequence:  Hypothetical Probe Sequence
cagctgtccttgtcccgctttccc

SEQ ID NO: 3203 - DNA, 24 bp, Artificial Sequence
  Description of Artificial Sequence:  Hypothetical Probe Sequence
cagctgtcctcatgcgtgcggacc

SEQ ID NO: 3204 - DNA, 24 bp, Artificial Sequence
  Description of Artificial Sequence:  Hypothetical Probe Sequence
cagctgtcgtgcccatgcaaccta

SEQ ID NO: 3205 - DNA, 24 bp, Artificial Sequence
  Description of Artificial Sequence:  Hypothetical Probe Sequence
cagctgtcagcccgaaacctacgg

SEQ ID NO: 3206 - DNA, 24 bp, Artificial Sequence
  Description of Artificial Sequence:  Hypothetical Probe Sequence
cagctcgttcccgcttggacaaag

SEQ ID NO: 3207 - DNA, 24 bp, Artificial Sequence
  Description of Artificial Sequence:  Hypothetical Probe Sequence
cagctcgtcagctcgtgagttgcg

SEQ ID NO: 3208 - DNA, 24 bp, Artificial Sequence
  Description of Artificial Sequence:  Hypothetical Probe Sequence
cagccttgaaaggcttagcctgcg

SEQ ID NO: 3209 - DNA, 24 bp, Artificial Sequence
  Description of Artificial Sequence:  Hypothetical Probe Sequence
cagccttgtctggaccagccctgt

SEQ ID NO: 3210 - DNA, 24 bp, Artificial Sequence
  Description of Artificial Sequence:  Hypothetical Probe Sequence
cagccttgtcgtatacgtgcgacc

SEQ ID NO: 3211 - DNA, 24 bp, Artificial Sequence
  Description of Artificial Sequence:  Hypothetical Probe Sequence
cagccttgagtggacctgcgggta

SEQ ID NO: 3212 - DNA, 24 bp, Artificial Sequence
  Description of Artificial Sequence:  Hypothetical Probe Sequence
cagccttgaggagcaagaccacgg

SEQ ID NO: 3213 - DNA, 24 bp, Artificial Sequence
  Description of Artificial Sequence:  Hypothetical Probe Sequence
cagccttgtcccctcaatcgagcc

SEQ ID NO: 3214 - DNA, 24 bp, Artificial Sequence
  Description of Artificial Sequence:  Hypothetical Probe Sequence
cagccttggacccgttcgttgatg

SEQ ID NO: 3215 - DNA, 24 bp, Artificial Sequence
  Description of Artificial Sequence:  Hypothetical Probe Sequence
cagccttgacgggcaagtctcgaa

SEQ ID NO: 3216 - DNA, 24 bp, Artificial Sequence
  Description of Artificial Sequence:  Hypothetical Probe Sequence
cagccgtttacatctgtccccgtt

SEQ ID NO: 3217 - DNA, 24 bp, Artificial Sequence
  Description of Artificial Sequence:  Hypothetical Probe Sequence
cagccgtttctgaaagcagcagga

SEQ ID NO: 3218 - DNA, 24 bp, Artificial Sequence
  Description of Artificial Sequence:  Hypothetical Probe Sequence
cagccgttgcttagccctcatctg

SEQ ID NO: 3219 - DNA, 24 bp, Artificial Sequence
  Description of Artificial Sequence:  Hypothetical Probe Sequence
cagccgttggtaacctgaccctca

SEQ ID NO: 3220 - DNA, 24 bp, Artificial Sequence
  Description of Artificial Sequence:  Hypothetical Probe Sequence
cagccgttgcaaatcggtctccat

SEQ ID NO: 3221 - DNA, 24 bp, Artificial Sequence
  Description of Artificial Sequence:  Hypothetical Probe Sequence
cagccgttatcggatgaccttccc

SEQ ID NO: 3222 - DNA, 24 bp, Artificial Sequence
  Description of Artificial Sequence:  Hypothetical Probe Sequence
cagccgttcctaacggataccacg

SEQ ID NO: 3223 - DNA, 24 bp, Artificial Sequence
  Description of Artificial Sequence:  Hypothetical Probe Sequence
cagccgttgtgctcgtaaaggcaa

SEQ ID NO: 3224 - DNA, 24 bp, Artificial Sequence
  Description of Artificial Sequence:  Hypothetical Probe Sequence
cagccgttggacgatggcttgatg

SEQ ID NO: 3225 - DNA, 24 bp, Artificial Sequence
  Description of Artificial Sequence:  Hypothetical Probe Sequence
cagccgttagccgcttagccaaag

SEQ ID NO: 3226 - DNA, 24 bp, Artificial Sequence
  Description of Artificial Sequence:  Hypothetical Probe Sequence
cagcctcatcgtaaaggtgcgctt

SEQ ID NO: 3227 - DNA, 24 bp, Artificial Sequence
  Description of Artificial Sequence:  Hypothetical Probe Sequence
cagcctcaccatcagcgtgcgagt

SEQ ID NO: 3228 - DNA, 24 bp, Artificial Sequence
  Description of Artificial Sequence:  Hypothetical Probe Sequence
cagcctcacgaacgaacgttccat

SEQ ID NO: 3229 - DNA, 24 bp, Artificial Sequence
  Description of Artificial Sequence:  Hypothetical Probe Sequence
cagcctcagctttcgtgcaatccc

SEQ ID NO: 3230 - DNA, 24 bp, Artificial Sequence
  Description of Artificial Sequence:  Hypothetical Probe Sequence
cagcctcagcaagaccgagtcacg

SEQ ID NO: 3231 - DNA, 24 bp, Artificial Sequence
  Description of Artificial Sequence:  Hypothetical Probe Sequence
cagcctcaacctaatcgaccgctt

SEQ ID NO: 3232 - DNA, 24 bp, Artificial Sequence
  Description of Artificial Sequence:  Hypothetical Probe Sequence
cagcctcatcccgaccaaagtccc

SEQ ID NO: 3233 - DNA, 24 bp, Artificial Sequence
  Description of Artificial Sequence:  Hypothetical Probe Sequence
cagcctcagacctgattccctgcg

SEQ ID NO: 3234 - DNA, 24 bp, Artificial Sequence
  Description of Artificial Sequence:  Hypothetical Probe Sequence
cagcctgtttgatcgtttgaacgg

SEQ ID NO: 3235 - DNA, 24 bp, Artificial Sequence
  Description of Artificial Sequence:  Hypothetical Probe Sequence
cagcctgttgatcgaatcccgtgc

SEQ ID NO: 3236 - DNA, 24 bp, Artificial Sequence
  Description of Artificial Sequence:  Hypothetical Probe Sequence
cagcctgttctgcgttgcaaacgg

SEQ ID NO: 3237 - DNA, 24 bp, Artificial Sequence
  Description of Artificial Sequence:  Hypothetical Probe Sequence
cagcctgtctcaagccggacgacc

SEQ ID NO: 3238 - DNA, 24 bp, Artificial Sequence
  Description of Artificial Sequence:  Hypothetical Probe Sequence
cagcctgtccatctcatgcggctt

SEQ ID NO: 3239 - DNA, 24 bp, Artificial Sequence
  Description of Artificial Sequence:  Hypothetical Probe Sequence
cagcctgtgcttctcatcccgatg

SEQ ID NO: 3240 - DNA, 24 bp, Artificial Sequence
  Description of Artificial Sequence:  Hypothetical Probe Sequence
cagcctgtgtgccgaagcttacct

SEQ ID NO: 3241 - DNA, 24 bp, Artificial Sequence
  Description of Artificial Sequence:  Hypothetical Probe Sequence
cagcccattacacacgcacgtccc

SEQ ID NO: 3242 - DNA, 24 bp, Artificial Sequence
  Description of Artificial Sequence:  Hypothetical Probe Sequence
cagcccattctgccatccatagcc

SEQ ID NO: 3243 - DNA, 24 bp, Artificial Sequence
  Description of Artificial Sequence:  Hypothetical Probe Sequence
cagcccatcttgtgatcacggctt

SEQ ID NO: 3244 - DNA, 24 bp, Artificial Sequence
  Description of Artificial Sequence:  Hypothetical Probe Sequence
cagcccatcgttgcttccatccat

SEQ ID NO: 3245 - DNA, 24 bp, Artificial Sequence
  Description of Artificial Sequence:  Hypothetical Probe Sequence
cagcccatgtctccatgaccacgg

SEQ ID NO: 3246 - DNA, 24 bp, Artificial Sequence
  Description of Artificial Sequence:  Hypothetical Probe Sequence
cagcccatgagtgcttagccacgg

SEQ ID NO: 3247 - DNA, 24 bp, Artificial Sequence
  Description of Artificial Sequence:  Hypothetical Probe Sequence
cagcccatgcaatctgctcacacg

SEQ ID NO: 3248 - DNA, 24 bp, Artificial Sequence
  Description of Artificial Sequence:  Hypothetical Probe Sequence
cagcccatcctaacggccatacct

SEQ ID NO: 3249 - DNA, 24 bp, Artificial Sequence
  Description of Artificial Sequence:  Hypothetical Probe Sequence
cagcccatcacgaaaggcttgacc

SEQ ID NO: 3250 - DNA, 24 bp, Artificial Sequence
  Description of Artificial Sequence:  Hypothetical Probe Sequence
cagcccatacgggagtgtgcggta

SEQ ID NO: 3251 - DNA, 24 bp, Artificial Sequence
  Description of Artificial Sequence:  Hypothetical Probe Sequence
cagccgaatctgaaagcgaacacg

SEQ ID NO: 3252 - DNA, 24 bp, Artificial Sequence
  Description of Artificial Sequence:  Hypothetical Probe Sequence
cagccgaatgtccgttcttgtccc

SEQ ID NO: 3253 - DNA, 24 bp, Artificial Sequence
  Description of Artificial Sequence:  Hypothetical Probe Sequence
cagccgaagtcttgcgaatcgatg

SEQ ID NO: 3254 - DNA, 24 bp, Artificial Sequence
  Description of Artificial Sequence:  Hypothetical Probe Sequence
cagccgaaagtgatacgtgcgcaa

SEQ ID NO: 3255 - DNA, 24 bp, Artificial Sequence
  Description of Artificial Sequence:  Hypothetical Probe Sequence
cagccgaaaggatgtcatcgagcc

SEQ ID NO: 3256 - DNA, 24 bp, Artificial Sequence
  Description of Artificial Sequence:  Hypothetical Probe Sequence
cagccgaatgcgcttggcaatgtc

SEQ ID NO: 3257 - DNA, 24 bp, Artificial Sequence
  Description of Artificial Sequence:  Hypothetical Probe Sequence
cagccgaacacggcttgctttgat

SEQ ID NO: 3258 - DNA, 24 bp, Artificial Sequence
  Description of Artificial Sequence:  Hypothetical Probe Sequence
cagccgaagacccacgatacgtgc

SEQ ID NO: 3259 - DNA, 24 bp, Artificial Sequence
  Description of Artificial Sequence:  Hypothetical Probe Sequence
cagccgaaacggcacgtgtcatcg

SEQ ID NO: 3260 - DNA, 24 bp, Artificial Sequence
  Description of Artificial Sequence:  Hypothetical Probe Sequence
cagccgaaagccggtagatgcgtt

SEQ ID NO: 3261 - DNA, 24 bp, Artificial Sequence
  Description of Artificial Sequence:  Hypothetical Probe Sequence
cagcgcttaatctgcgtctgccat

SEQ ID NO: 3262 - DNA, 24 bp, Artificial Sequence
  Description of Artificial Sequence:  Hypothetical Probe Sequence
cagcgctttacacgtttgtccagc

SEQ ID NO: 3263 - DNA, 24 bp, Artificial Sequence
  Description of Artificial Sequence:  Hypothetical Probe Sequence
cagcgctttgtccgaaaaagacgg

SEQ ID NO: 3264 - DNA, 24 bp, Artificial Sequence
  Description of Artificial Sequence:  Hypothetical Probe Sequence
cagcgctttcgttcgtttgaatcg

SEQ ID NO: 3265 - DNA, 24 bp, Artificial Sequence
  Description of Artificial Sequence:  Hypothetical Probe Sequence
cagcgcttctcaggacccatccta

SEQ ID NO: 3266 - DNA, 24 bp, Artificial Sequence
  Description of Artificial Sequence:  Hypothetical Probe Sequence
cagcgcttctgtcgaagtgccagc

SEQ ID NO: 3267 - DNA, 24 bp, Artificial Sequence
  Description of Artificial Sequence:  Hypothetical Probe Sequence
cagcgcttatcgcgaaaatcctca

SEQ ID NO: 3268 - DNA, 24 bp, Artificial Sequence
  Description of Artificial Sequence:  Hypothetical Probe Sequence
cagcgctttgcggcttgagttcgt

SEQ ID NO: 3269 - DNA, 24 bp, Artificial Sequence
  Description of Artificial Sequence:  Hypothetical Probe Sequence
cagcgcttagccttgacttggtgc

SEQ ID NO: 3270 - DNA, 24 bp, Artificial Sequence
  Description of Artificial Sequence:  Hypothetical Probe Sequence
cagcggtaccatccatgaccggta

SEQ ID NO: 3271 - DNA, 24 bp, Artificial Sequence
  Description of Artificial Sequence:  Hypothetical Probe Sequence
cagcggtacgaacgaacttgctca

SEQ ID NO: 3272 - DNA, 24 bp, Artificial Sequence
  Description of Artificial Sequence:  Hypothetical Probe Sequence
cagcggtacagcacctgcttgcaa

SEQ ID NO: 3273 - DNA, 24 bp, Artificial Sequence
  Description of Artificial Sequence:  Hypothetical Probe Sequence
cagcgtcttgatggaccagccagc

SEQ ID NO: 3274 - DNA, 24 bp, Artificial Sequence
  Description of Artificial Sequence:  Hypothetical Probe Sequence
cagcgtctccatctcatcgttgcg

SEQ ID NO: 3275 - DNA, 24 bp, Artificial Sequence
  Description of Artificial Sequence:  Hypothetical Probe Sequence
cagcgtctcgaatcgttccctcgt

SEQ ID NO: 3276 - DNA, 24 bp, Artificial Sequence
  Description of Artificial Sequence:  Hypothetical Probe Sequence
cagcgtctgcttatcgtcccacgg

SEQ ID NO: 3277 - DNA, 24 bp, Artificial Sequence
  Description of Artificial Sequence:  Hypothetical Probe Sequence
cagcgtcttgcgaggagatggacc

SEQ ID NO: 3278 - DNA, 24 bp, Artificial Sequence
  Description of Artificial Sequence:  Hypothetical Probe Sequence
cagcgtctggacttgaatcgcgaa

SEQ ID NO: 3279 - DNA, 24 bp, Artificial Sequence
  Description of Artificial Sequence:  Hypothetical Probe Sequence
cagcgtctacggaatcacggggac

SEQ ID NO: 3280 - DNA, 24 bp, Artificial Sequence
  Description of Artificial Sequence:  Hypothetical Probe Sequence
cagcgagttctgcagcgatggctt

SEQ ID NO: 3281 - DNA, 24 bp, Artificial Sequence
  Description of Artificial Sequence:  Hypothetical Probe Sequence
cagcgagtcttggcaacacgcgaa

SEQ ID NO: 3282 - DNA, 24 bp, Artificial Sequence
  Description of Artificial Sequence:  Hypothetical Probe Sequence
cagcgagtcgttatcgtgtcacgg

SEQ ID NO: 3283 - DNA, 24 bp, Artificial Sequence
  Description of Artificial Sequence:  Hypothetical Probe Sequence
cagcgagtcgaaaggacgaaagcc

SEQ ID NO: 3284 - DNA, 24 bp, Artificial Sequence
  Description of Artificial Sequence:  Hypothetical Probe Sequence
cagcgagtgtgcgacctgcgtgat

SEQ ID NO: 3285 - DNA, 24 bp, Artificial Sequence
  Description of Artificial Sequence:  Hypothetical Probe Sequence
cagcgcaatgatcgaaatcgggta

SEQ ID NO: 3286 - DNA, 24 bp, Artificial Sequence
  Description of Artificial Sequence:  Hypothetical Probe Sequence
cagcgcaaatacaatccagcggac

SEQ ID NO: 3287 - DNA, 24 bp, Artificial Sequence
  Description of Artificial Sequence:  Hypothetical Probe Sequence
cagcgcaatctggcttgatgggta

SEQ ID NO: 3288 - DNA, 24 bp, Artificial Sequence
  Description of Artificial Sequence:  Hypothetical Probe Sequence
cagcgcaatgtccgttggacctgt

SEQ ID NO: 3289 - DNA, 24 bp, Artificial Sequence
  Description of Artificial Sequence:  Hypothetical Probe Sequence
cagcgcaaccatggtaatcgagga

SEQ ID NO: 3290 - DNA, 24 bp, Artificial Sequence
  Description of Artificial Sequence:  Hypothetical Probe Sequence
cagcgcaacgaatcgtcttgagga

SEQ ID NO: 3291 - DNA, 24 bp, Artificial Sequence
  Description of Artificial Sequence:  Hypothetical Probe Sequence
cagcgcaaggtagcaagaccggta

SEQ ID NO: 3292 - DNA, 24 bp, Artificial Sequence
  Description of Artificial Sequence:  Hypothetical Probe Sequence
cagcgcaagagtcgttcttggacc

SEQ ID NO: 3293 - DNA, 24 bp, Artificial Sequence
  Description of Artificial Sequence:  Hypothetical Probe Sequence
cagcgcaaagtgtgattcccccta

SEQ ID NO: 3294 - DNA, 24 bp, Artificial Sequence
  Description of Artificial Sequence:  Hypothetical Probe Sequence
cagcgcaaggacgatggaccaaag

SEQ ID NO: 3295 - DNA, 24 bp, Artificial Sequence
  Description of Artificial Sequence:  Hypothetical Probe Sequence
cagcgcaaacggtcgtcacgaatc

SEQ ID NO: 3296 - DNA, 24 bp, Artificial Sequence
  Description of Artificial Sequence:  Hypothetical Probe Sequence
cagcagtgtcgtgtgctccccacg

SEQ ID NO: 3297 - DNA, 24 bp, Artificial Sequence
  Description of Artificial Sequence:  Hypothetical Probe Sequence
cagcagtggcttgtgcctgttccc

SEQ ID NO: 3298 - DNA, 24 bp, Artificial Sequence
  Description of Artificial Sequence:  Hypothetical Probe Sequence
cagcagtgcctaatcgcacgctgt

SEQ ID NO: 3299 - DNA, 24 bp, Artificial Sequence
  Description of Artificial Sequence:  Hypothetical Probe Sequence
cagcagtgtccccttgccattcgt

SEQ ID NO: 3300 - DNA, 24 bp, Artificial Sequence
  Description of Artificial Sequence:  Hypothetical Probe Sequence
cagcagtgggacgtctacggtgcg

SEQ ID NO: 3301 - DNA, 24 bp, Artificial Sequence
  Description of Artificial Sequence:  Hypothetical Probe Sequence
cagcacctcgaaaatctgcggatg

SEQ ID NO: 3302 - DNA, 24 bp, Artificial Sequence
  Description of Artificial Sequence:  Hypothetical Probe Sequence
cagcacctcacgtctgcgaagcaa

SEQ ID NO: 3303 - DNA, 24 bp, Artificial Sequence
  Description of Artificial Sequence:  Hypothetical Probe Sequence
cagcacctgtgcgacctgtccgaa

SEQ ID NO: 3304 - DNA, 24 bp, Artificial Sequence
  Description of Artificial Sequence:  Hypothetical Probe Sequence
cagcacctggacgcttgtgcagga

SEQ ID NO: 3305 - DNA, 24 bp, Artificial Sequence
  Description of Artificial Sequence:  Hypothetical Probe Sequence
cagcatcggcttacctgtgcatcg

SEQ ID NO: 3306 - DNA, 24 bp, Artificial Sequence
  Description of Artificial Sequence:  Hypothetical Probe Sequence
cagcatcgggtaagtgagccgctt

SEQ ID NO: 3307 - DNA, 24 bp, Artificial Sequence
  Description of Artificial Sequence:  Hypothetical Probe Sequence
cagcatcgatcggcaatctggtgc

SEQ ID NO: 3308 - DNA, 24 bp, Artificial Sequence
  Description of Artificial Sequence:  Hypothetical Probe Sequence
cagcatcgacggcacgggtaagtg

SEQ ID NO: 3309 - DNA, 24 bp, Artificial Sequence
  Description of Artificial Sequence:  Hypothetical Probe Sequence
cagcaggaaatcacggtccctccc

SEQ ID NO: 3310 - DNA, 24 bp, Artificial Sequence
  Description of Artificial Sequence:  Hypothetical Probe Sequence
cagcaggatcgtgtctcgaatgcg

SEQ ID NO: 3311 - DNA, 24 bp, Artificial Sequence
  Description of Artificial Sequence:  Hypothetical Probe Sequence
cagcaggacttgacggcacgccta

SEQ ID NO: 3312 - DNA, 24 bp, Artificial Sequence
  Description of Artificial Sequence:  Hypothetical Probe Sequence
cagcaggagcaaatcggtgctcgt

SEQ ID NO: 3313 - DNA, 24 bp, Artificial Sequence
  Description of Artificial Sequence:  Hypothetical Probe Sequence
cagcaggaagtgtgcgctgtcacg

SEQ ID NO: 3314 - DNA, 24 bp, Artificial Sequence
  Description of Artificial Sequence:  Hypothetical Probe Sequence
cagcaggacacggatggcttacgg

SEQ ID NO: 3315 - DNA, 24 bp, Artificial Sequence
  Description of Artificial Sequence:  Hypothetical Probe Sequence
cagcaggagtgctctgggactccc

SEQ ID NO: 3316 - DNA, 24 bp, Artificial Sequence
  Description of Artificial Sequence:  Hypothetical Probe Sequence
cagcaggaagccatacggacagga

SEQ ID NO: 3317 - DNA, 24 bp, Artificial Sequence
  Description of Artificial Sequence:  Hypothetical Probe Sequence
cagccctatcgtgctttgtcgcaa

SEQ ID NO: 3318 - DNA, 24 bp, Artificial Sequence
  Description of Artificial Sequence:  Hypothetical Probe Sequence
cagccctacgaatctgcagctccc

SEQ ID NO: 3319 - DNA, 24 bp, Artificial Sequence
  Description of Artificial Sequence:  Hypothetical Probe Sequence
cagccctagcaaatactccctgcg

SEQ ID NO: 3320 - DNA, 24 bp, Artificial Sequence
  Description of Artificial Sequence:  Hypothetical Probe Sequence
cagccctaagtgagccgtcttccc

SEQ ID NO: 3321 - DNA, 24 bp, Artificial Sequence
  Description of Artificial Sequence:  Hypothetical Probe Sequence
cagccctaaccttcccagccgagt

SEQ ID NO: 3322 - DNA, 24 bp, Artificial Sequence
  Description of Artificial Sequence:  Hypothetical Probe Sequence
cagccctaacggtcgtctgtgcaa

SEQ ID NO: 3323 - DNA, 24 bp, Artificial Sequence
  Description of Artificial Sequence:  Hypothetical Probe Sequence
cagcgatgaatccacgggaccgtt

SEQ ID NO: 3324 - DNA, 24 bp, Artificial Sequence
  Description of Artificial Sequence:  Hypothetical Probe Sequence
cagcgatgtctgacctatcgcgaa

SEQ ID NO: 3325 - DNA, 24 bp, Artificial Sequence
  Description of Artificial Sequence:  Hypothetical Probe Sequence
cagcgatgtgtcccatgctttgcg

SEQ ID NO: 3326 - DNA, 24 bp, Artificial Sequence
  Description of Artificial Sequence:  Hypothetical Probe Sequence
cagcgatgcttgctgtcttgcgtt

SEQ ID NO: 3327 - DNA, 24 bp, Artificial Sequence
  Description of Artificial Sequence:  Hypothetical Probe Sequence
cagcgatgctcagtgctctgagcc

SEQ ID NO: 3328 - DNA, 24 bp, Artificial Sequence
  Description of Artificial Sequence:  Hypothetical Probe Sequence
cagcgatggtcttgattcccgcaa

SEQ ID NO: 3329 - DNA, 24 bp, Artificial Sequence
  Description of Artificial Sequence:  Hypothetical Probe Sequence
cagcgatgaggatcgttcgtgacc

SEQ ID NO: 3330 - DNA, 24 bp, Artificial Sequence
  Description of Artificial Sequence:  Hypothetical Probe Sequence
cagcgatgcctagcaacctaacgg

SEQ ID NO: 3331 - DNA, 24 bp, Artificial Sequence
  Description of Artificial Sequence:  Hypothetical Probe Sequence
cagcgatgtccccttgcctacgtt

SEQ ID NO: 3332 - DNA, 24 bp, Artificial Sequence
  Description of Artificial Sequence:  Hypothetical Probe Sequence
cagcgatggaccgatgagtgcgtt

SEQ ID NO: 3333 - DNA, 24 bp, Artificial Sequence
  Description of Artificial Sequence:  Hypothetical Probe Sequence
cagcgatgacgggatgtcgttccc

SEQ ID NO: 3334 - DNA, 24 bp, Artificial Sequence
  Description of Artificial Sequence:  Hypothetical Probe Sequence
cagcgatgagccctgtgcaatcgt

SEQ ID NO: 3335 - DNA, 24 bp, Artificial Sequence
  Description of Artificial Sequence:  Hypothetical Probe Sequence
cagctcccaaagtcccctgtagcc

SEQ ID NO: 3336 - DNA, 24 bp, Artificial Sequence
  Description of Artificial Sequence:  Hypothetical Probe Sequence
cagctccccgttaaagatcggacc

SEQ ID NO: 3337 - DNA, 24 bp, Artificial Sequence
  Description of Artificial Sequence:  Hypothetical Probe Sequence
cagctcccctgtatcgcgttccta

SEQ ID NO: 3338 - DNA, 24 bp, Artificial Sequence
  Description of Artificial Sequence:  Hypothetical Probe Sequence
cagctccccgaaatcgtgtcgatg

SEQ ID NO: 3339 - DNA, 24 bp, Artificial Sequence
  Description of Artificial Sequence:  Hypothetical Probe Sequence
cagctcccgagtgcttttgaagcc

SEQ ID NO: 3340 - DNA, 24 bp, Artificial Sequence
  Description of Artificial Sequence:  Hypothetical Probe Sequence
cagctcccagtgttagacggccat

SEQ ID NO: 3341 - DNA, 24 bp, Artificial Sequence
  Description of Artificial Sequence:  Hypothetical Probe Sequence
cagctcccacctacctggacgtct

SEQ ID NO: 3342 - DNA, 24 bp, Artificial Sequence
  Description of Artificial Sequence:  Hypothetical Probe Sequence
cagctcccgatggtcttcgtcgtt

SEQ ID NO: 3343 - DNA, 24 bp, Artificial Sequence
  Description of Artificial Sequence:  Hypothetical Probe Sequence
cagctccctcccgagttcccgagt

SEQ ID NO: 3344 - DNA, 24 bp, Artificial Sequence
  Description of Artificial Sequence:  Hypothetical Probe Sequence
cagctccctgcgaatcaggacgaa

SEQ ID NO: 3345 - DNA, 24 bp, Artificial Sequence
  Description of Artificial Sequence:  Hypothetical Probe Sequence
cagctccccacggatgatcgatcg

SEQ ID NO: 3346 - DNA, 24 bp, Artificial Sequence
  Description of Artificial Sequence:  Hypothetical Probe Sequence
cagctcccacggtcgttgtccttg

SEQ ID NO: 3347 - DNA, 24 bp, Artificial Sequence
  Description of Artificial Sequence:  Hypothetical Probe Sequence
cagctgcgttgagtgccgttgtct

SEQ ID NO: 3348 - DNA, 24 bp, Artificial Sequence
  Description of Artificial Sequence:  Hypothetical Probe Sequence
cagctgcgttagtctgggaccgaa

SEQ ID NO: 3349 - DNA, 24 bp, Artificial Sequence
  Description of Artificial Sequence:  Hypothetical Probe Sequence
cagctgcgataccgaaagcccgtt

SEQ ID NO: 3350 - DNA, 24 bp, Artificial Sequence
  Description of Artificial Sequence:  Hypothetical Probe Sequence
cagctgcgtctggacccagcacct

SEQ ID NO: 3351 - DNA, 24 bp, Artificial Sequence
  Description of Artificial Sequence:  Hypothetical Probe Sequence
cagctgcgacctaatcagcctcgt

SEQ ID NO: 3352 - DNA, 24 bp, Artificial Sequence
  Description of Artificial Sequence:  Hypothetical Probe Sequence
cagctgcgatcggctttgatgcaa

SEQ ID NO: 3353 - DNA, 24 bp, Artificial Sequence
  Description of Artificial Sequence:  Hypothetical Probe Sequence
cagctgcggatggcttgagtcagc

SEQ ID NO: 3354 - DNA, 24 bp, Artificial Sequence
  Description of Artificial Sequence:  Hypothetical Probe Sequence
cagctgcgtccctgtccacgttga

SEQ ID NO: 3355 - DNA, 24 bp, Artificial Sequence
  Description of Artificial Sequence:  Hypothetical Probe Sequence
cagctgcgcacgcttgacggtctg

SEQ ID NO: 3356 - DNA, 24 bp, Artificial Sequence
  Description of Artificial Sequence:  Hypothetical Probe Sequence
cagccacgttgattaggaccgcaa

SEQ ID NO: 3357 - DNA, 24 bp, Artificial Sequence
  Description of Artificial Sequence:  Hypothetical Probe Sequence
cagccacgaatcgagttgcggagt

SEQ ID NO: 3358 - DNA, 24 bp, Artificial Sequence
  Description of Artificial Sequence:  Hypothetical Probe Sequence
cagccacgataccgaaggacggac

SEQ ID NO: 3359 - DNA, 24 bp, Artificial Sequence
  Description of Artificial Sequence:  Hypothetical Probe Sequence
cagccacgtctgtgtctcccacgg

SEQ ID NO: 3360 - DNA, 24 bp, Artificial Sequence
  Description of Artificial Sequence:  Hypothetical Probe Sequence
cagccacgtcgtgcaagtcttctg

SEQ ID NO: 3361 - DNA, 24 bp, Artificial Sequence
  Description of Artificial Sequence:  Hypothetical Probe Sequence
cagccacgcgttcgttccatctgt

SEQ ID NO: 3362 - DNA, 24 bp, Artificial Sequence
  Description of Artificial Sequence:  Hypothetical Probe Sequence
cagccacgcgaagtgcaatcgtct

SEQ ID NO: 3363 - DNA, 24 bp, Artificial Sequence
  Description of Artificial Sequence:  Hypothetical Probe Sequence
cagccacgcctatccccctatgtc

SEQ ID NO: 3364 - DNA, 24 bp, Artificial Sequence
  Description of Artificial Sequence:  Hypothetical Probe Sequence
cagccagcttgaggacggtatccc

SEQ ID NO: 3365 - DNA, 24 bp, Artificial Sequence
  Description of Artificial Sequence:  Hypothetical Probe Sequence
cagccagcttaggaccgtgctccc

SEQ ID NO: 3366 - DNA, 24 bp, Artificial Sequence
  Description of Artificial Sequence:  Hypothetical Probe Sequence
cagccagctgtcacggaggagtgc

SEQ ID NO: 3367 - DNA, 24 bp, Artificial Sequence
  Description of Artificial Sequence:  Hypothetical Probe Sequence
cagccagcctcaatacggtatgcg

SEQ ID NO: 3368 - DNA, 24 bp, Artificial Sequence
  Description of Artificial Sequence:  Hypothetical Probe Sequence
cagccagcccatatcgatactgcg

SEQ ID NO: 3369 - DNA, 24 bp, Artificial Sequence
  Description of Artificial Sequence:  Hypothetical Probe Sequence
cagccagcaggacgttcgaattga

SEQ ID NO: 3370 - DNA, 24 bp, Artificial Sequence
  Description of Artificial Sequence:  Hypothetical Probe Sequence
cagccagcgatgttagggacgtct

SEQ ID NO: 3371 - DNA, 24 bp, Artificial Sequence
  Description of Artificial Sequence:  Hypothetical Probe Sequence
cagccagctcccggtacttgagcc

SEQ ID NO: 3372 - DNA, 24 bp, Artificial Sequence
  Description of Artificial Sequence:  Hypothetical Probe Sequence
cagccagcagcccttggatgctca

SEQ ID NO: 3373 - DNA, 24 bp, Artificial Sequence
  Description of Artificial Sequence:  Hypothetical Probe Sequence
cagcgaccaatcatacagcccacg

SEQ ID NO: 3374 - DNA, 24 bp, Artificial Sequence
  Description of Artificial Sequence:  Hypothetical Probe Sequence
cagcgacctcgtaggagcaaccat

SEQ ID NO: 3375 - DNA, 24 bp, Artificial Sequence
  Description of Artificial Sequence:  Hypothetical Probe Sequence
cagcgacccttgcctagacccacg

SEQ ID NO: 3376 - DNA, 24 bp, Artificial Sequence
  Description of Artificial Sequence:  Hypothetical Probe Sequence
cagcgaccgcaacacggtctcttg

SEQ ID NO: 3377 - DNA, 24 bp, Artificial Sequence
  Description of Artificial Sequence:  Hypothetical Probe Sequence
cagcgaccatcgtacacagcccat

SEQ ID NO: 3378 - DNA, 24 bp, Artificial Sequence
  Description of Artificial Sequence:  Hypothetical Probe Sequence
cagcgacctcccaatcggacgagt

SEQ ID NO: 3379 - DNA, 24 bp, Artificial Sequence
  Description of Artificial Sequence:  Hypothetical Probe Sequence
cagcgacccacggctttacatccc

SEQ ID NO: 3380 - DNA, 24 bp, Artificial Sequence
  Description of Artificial Sequence:  Hypothetical Probe Sequence
cagcgaccgacctcgtctgtcgtt

SEQ ID NO: 3381 - DNA, 24 bp, Artificial Sequence
  Description of Artificial Sequence:  Hypothetical Probe Sequence
cagcgaccagccaggaaatccagc

SEQ ID NO: 3382 - DNA, 24 bp, Artificial Sequence
  Description of Artificial Sequence:  Hypothetical Probe Sequence
cagcgtgcatactgcgaaagagcc

SEQ ID NO: 3383 - DNA, 24 bp, Artificial Sequence
  Description of Artificial Sequence:  Hypothetical Probe Sequence
cagcgtgctacaagtgcacgggta

SEQ ID NO: 3384 - DNA, 24 bp, Artificial Sequence
  Description of Artificial Sequence:  Hypothetical Probe Sequence
cagcgtgctctggatggcaatccc

SEQ ID NO: 3385 - DNA, 24 bp, Artificial Sequence
  Description of Artificial Sequence:  Hypothetical Probe Sequence
cagcgtgctcgtagtgacggccta

SEQ ID NO: 3386 - DNA, 24 bp, Artificial Sequence
  Description of Artificial Sequence:  Hypothetical Probe Sequence
cagcgtgcctgtaatctgcgtgtc

SEQ ID NO: 3387 - DNA, 24 bp, Artificial Sequence
  Description of Artificial Sequence:  Hypothetical Probe Sequence
cagcgtgccgaactgtgcttcagc

SEQ ID NO: 3388 - DNA, 24 bp, Artificial Sequence
  Description of Artificial Sequence:  Hypothetical Probe Sequence
cagcgtgcgtctcttgcttgctca

SEQ ID NO: 3389 - DNA, 24 bp, Artificial Sequence
  Description of Artificial Sequence:  Hypothetical Probe Sequence
cagcgtgcaccttcgtcacgacct

SEQ ID NO: 3390 - DNA, 24 bp, Artificial Sequence
  Description of Artificial Sequence:  Hypothetical Probe Sequence
cagcgtgccacgcttgtcgtgtgc

SEQ ID NO: 3391 - DNA, 24 bp, Artificial Sequence
  Description of Artificial Sequence:  Hypothetical Probe Sequence
cagcgtgcgacccacggatgttga

SEQ ID NO: 3392 - DNA, 24 bp, Artificial Sequence
  Description of Artificial Sequence:  Hypothetical Probe Sequence
cagcgtgcggacatcgtgatacgg

SEQ ID NO: 3393 - DNA, 24 bp, Artificial Sequence
  Description of Artificial Sequence:  Hypothetical Probe Sequence
cagcgtgcacggcagcgagtctca

SEQ ID NO: 3394 - DNA, 24 bp, Artificial Sequence
  Description of Artificial Sequence:  Hypothetical Probe Sequence
cagcgtgcagccctcaacggtctg

SEQ ID NO: 3395 - DNA, 24 bp, Artificial Sequence
  Description of Artificial Sequence:  Hypothetical Probe Sequence
cagcggactgatagccaggacacg

SEQ ID NO: 3396 - DNA, 24 bp, Artificial Sequence
  Description of Artificial Sequence:  Hypothetical Probe Sequence
cagcggacaatcaaaggcaaccat

SEQ ID NO: 3397 - DNA, 24 bp, Artificial Sequence
  Description of Artificial Sequence:  Hypothetical Probe Sequence
cagcggactgtcaatccgaaagcc

SEQ ID NO: 3398 - DNA, 24 bp, Artificial Sequence
  Description of Artificial Sequence:  Hypothetical Probe Sequence
cagcggacgagtcgaagcttagga

SEQ ID NO: 3399 - DNA, 24 bp, Artificial Sequence
  Description of Artificial Sequence:  Hypothetical Probe Sequence
cagcggacaccttacaagccagcc

SEQ ID NO: 3400 - DNA, 24 bp, Artificial Sequence
  Description of Artificial Sequence:  Hypothetical Probe Sequence
cagcggacgatgggacacctcgaa

SEQ ID NO: 3401 - DNA, 24 bp, Artificial Sequence
  Description of Artificial Sequence:  Hypothetical Probe Sequence
cagcggactgcggtctggacgacc

SEQ ID NO: 3402 - DNA, 24 bp, Artificial Sequence
  Description of Artificial Sequence:  Hypothetical Probe Sequence
cagcggaccacgccatgctttgtc

SEQ ID NO: 3403 - DNA, 24 bp, Artificial Sequence
  Description of Artificial Sequence:  Hypothetical Probe Sequence
cagcggaccagccctaccatcagc

SEQ ID NO: 3404 - DNA, 24 bp, Artificial Sequence
  Description of Artificial Sequence:  Hypothetical Probe Sequence
cagcggacacggcgaactgtgtgc

SEQ ID NO: 3405 - DNA, 24 bp, Artificial Sequence
  Description of Artificial Sequence:  Hypothetical Probe Sequence
cagcacggttgaaatccctaacgg

SEQ ID NO: 3406 - DNA, 24 bp, Artificial Sequence
  Description of Artificial Sequence:  Hypothetical Probe Sequence
cagcacggtgatgatgcgttagcc

SEQ ID NO: 3407 - DNA, 24 bp, Artificial Sequence
  Description of Artificial Sequence:  Hypothetical Probe Sequence
cagcacggaatctctgggtatgcg

SEQ ID NO: 3408 - DNA, 24 bp, Artificial Sequence
  Description of Artificial Sequence:  Hypothetical Probe Sequence
cagcacggatacaaagcacgtcgt

SEQ ID NO: 3409 - DNA, 24 bp, Artificial Sequence
  Description of Artificial Sequence:  Hypothetical Probe Sequence
cagcacggctgtgaccgcttagtg

SEQ ID NO: 3410 - DNA, 24 bp, Artificial Sequence
  Description of Artificial Sequence:  Hypothetical Probe Sequence
cagcacggcgaagcttgatgagga

SEQ ID NO: 3411 - DNA, 24 bp, Artificial Sequence
  Description of Artificial Sequence:  Hypothetical Probe Sequence
cagcacgggcttgtctcctatgcg

SEQ ID NO: 3412 - DNA, 24 bp, Artificial Sequence
  Description of Artificial Sequence:  Hypothetical Probe Sequence
cagcacggggtacgaatccctaca

SEQ ID NO: 3413 - DNA, 24 bp, Artificial Sequence
  Description of Artificial Sequence:  Hypothetical Probe Sequence
cagcacgggagtatcgagtgagcc

SEQ ID NO: 3414 - DNA, 24 bp, Artificial Sequence
  Description of Artificial Sequence:  Hypothetical Probe Sequence
cagcacggaccttctgcgttccat

SEQ ID NO: 3415 - DNA, 24 bp, Artificial Sequence
  Description of Artificial Sequence:  Hypothetical Probe Sequence
cagcacggatcgtcccagtgacct

SEQ ID NO: 3416 - DNA, 24 bp, Artificial Sequence
  Description of Artificial Sequence:  Hypothetical Probe Sequence
cagcacggaggaacctgagtgcaa

SEQ ID NO: 3417 - DNA, 24 bp, Artificial Sequence
  Description of Artificial Sequence:  Hypothetical Probe Sequence
cagcacggagccacctgtgcctgt

SEQ ID NO: 3418 - DNA, 24 bp, Artificial Sequence
  Description of Artificial Sequence:  Hypothetical Probe Sequence
cagcagcctgataaagagccacgg

SEQ ID NO: 3419 - DNA, 24 bp, Artificial Sequence
  Description of Artificial Sequence:  Hypothetical Probe Sequence
cagcagccaatccttggtgcctca

SEQ ID NO: 3420 - DNA, 24 bp, Artificial Sequence
  Description of Artificial Sequence:  Hypothetical Probe Sequence
cagcagcctctgtcgtggacccta

SEQ ID NO: 3421 - DNA, 24 bp, Artificial Sequence
  Description of Artificial Sequence:  Hypothetical Probe Sequence
cagcagcctgtcgtgcgcaagacc

SEQ ID NO: 3422 - DNA, 24 bp, Artificial Sequence
  Description of Artificial Sequence:  Hypothetical Probe Sequence
cagcagcccgttcctaaggaacct

SEQ ID NO: 3423 - DNA, 24 bp, Artificial Sequence
  Description of Artificial Sequence:  Hypothetical Probe Sequence
cagcagccgtctcttgctcagcaa

SEQ ID NO: 3424 - DNA, 24 bp, Artificial Sequence
  Description of Artificial Sequence:  Hypothetical Probe Sequence
cagcagccgagtgagtcacgcgtt

SEQ ID NO: 3425 - DNA, 24 bp, Artificial Sequence
  Description of Artificial Sequence:  Hypothetical Probe Sequence
cagcagccacctgatgtgtcgcaa

SEQ ID NO: 3426 - DNA, 24 bp, Artificial Sequence
  Description of Artificial Sequence:  Hypothetical Probe Sequence
cagcagccgatgatcgctcacagc

SEQ ID NO: 3427 - DNA, 24 bp, Artificial Sequence
  Description of Artificial Sequence:  Hypothetical Probe Sequence
cagcagccgacctacatcccgtct

SEQ ID NO: 3428 - DNA, 24 bp, Artificial Sequence
  Description of Artificial Sequence:  Hypothetical Probe Sequence
gaccttaggcaaacggcacgcgaa

SEQ ID NO: 3429 - DNA, 24 bp, Artificial Sequence
  Description of Artificial Sequence:  Hypothetical Probe Sequence
gaccaatccgaacgaacgaaacgg

SEQ ID NO: 3430 - DNA, 24 bp, Artificial Sequence
  Description of Artificial Sequence:  Hypothetical Probe Sequence
gaccaatcggacgtgcggactcgt

SEQ ID NO: 3431 - DNA, 24 bp, Artificial Sequence
  Description of Artificial Sequence:  Hypothetical Probe Sequence
gaccaaagcgttagccctgtcagc

SEQ ID NO: 3432 - DNA, 24 bp, Artificial Sequence
  Description of Artificial Sequence:  Hypothetical Probe Sequence
gaccaaagatcgcgttgtgctgcg

SEQ ID NO: 3433 - DNA, 24 bp, Artificial Sequence
  Description of Artificial Sequence:  Hypothetical Probe Sequence
gaccaaaggatgcacggacctgcg

SEQ ID NO: 3434 - DNA, 24 bp, Artificial Sequence
  Description of Artificial Sequence:  Hypothetical Probe Sequence
gaccaaagggacgaccaggaacgg

SEQ ID NO: 3435 - DNA, 24 bp, Artificial Sequence
  Description of Artificial Sequence:  Hypothetical Probe Sequence
gacctctggtgccagcgcttggac

SEQ ID NO: 3436 - DNA, 24 bp, Artificial Sequence
  Description of Artificial Sequence:  Hypothetical Probe Sequence
gacctctgacggcgtttcgttccc

SEQ ID NO: 3437 - DNA, 24 bp, Artificial Sequence
  Description of Artificial Sequence:  Hypothetical Probe Sequence
gacctgtcgtgcaaagccatgacc

SEQ ID NO: 3438 - DNA, 24 bp, Artificial Sequence
  Description of Artificial Sequence:  Hypothetical Probe Sequence
gacctcgtcgaatgcggtctgtgc

SEQ ID NO: 3439 - DNA, 24 bp, Artificial Sequence
  Description of Artificial Sequence:  Hypothetical Probe Sequence
gacctcgtggtatcccgtgcgagt

SEQ ID NO: 3440 - DNA, 24 bp, Artificial Sequence
  Description of Artificial Sequence:  Hypothetical Probe Sequence
gacctcgtcacggcttacggctgt

SEQ ID NO: 3441 - DNA, 24 bp, Artificial Sequence
  Description of Artificial Sequence:  Hypothetical Probe Sequence
gacccttgcgaatcgttacatgcg

SEQ ID NO: 3442 - DNA, 24 bp, Artificial Sequence
  Description of Artificial Sequence:  Hypothetical Probe Sequence
gacccttgggtaccattcccccta

SEQ ID NO: 3443 - DNA, 24 bp, Artificial Sequence
  Description of Artificial Sequence:  Hypothetical Probe Sequence
gacccttgcagccctacagccagc

SEQ ID NO: 3444 - DNA, 24 bp, Artificial Sequence
  Description of Artificial Sequence:  Hypothetical Probe Sequence
gacccgtttacagtgcggacctgt

SEQ ID NO: 3445 - DNA, 24 bp, Artificial Sequence
  Description of Artificial Sequence:  Hypothetical Probe Sequence
gacccgtttctgcacggtctgacc

SEQ ID NO: 3446 - DNA, 24 bp, Artificial Sequence
  Description of Artificial Sequence:  Hypothetical Probe Sequence
gacccgttctcagctttcccgagt

SEQ ID NO: 3447 - DNA, 24 bp, Artificial Sequence
  Description of Artificial Sequence:  Hypothetical Probe Sequence
gacccgttggtacagcaatctgcg

SEQ ID NO: 3448 - DNA, 24 bp, Artificial Sequence
  Description of Artificial Sequence:  Hypothetical Probe Sequence
gacccgttagtgttgatgcgcacg

SEQ ID NO: 3449 - DNA, 24 bp, Artificial Sequence
  Description of Artificial Sequence:  Hypothetical Probe Sequence
gacccgttaggatcccccatcgaa

SEQ ID NO: 3450 - DNA, 24 bp, Artificial Sequence
  Description of Artificial Sequence:  Hypothetical Probe Sequence
gacccgttgatgatcgcagcccta

SEQ ID NO: 3451 - DNA, 24 bp, Artificial Sequence
  Description of Artificial Sequence:  Hypothetical Probe Sequence
gacccgtttgcgaatctgtcgctt

SEQ ID NO: 3452 - DNA, 24 bp, Artificial Sequence
  Description of Artificial Sequence:  Hypothetical Probe Sequence
gacccgttcacgtgatgcttcgaa

SEQ ID NO: 3453 - DNA, 24 bp, Artificial Sequence
  Description of Artificial Sequence:  Hypothetical Probe Sequence
gacccgttcagcggtatctgtgcg

SEQ ID NO: 3454 - DNA, 24 bp, Artificial Sequence
  Description of Artificial Sequence:  Hypothetical Probe Sequence
gacccgttgtgcggacacctcagc

SEQ ID NO: 3455 - DNA, 24 bp, Artificial Sequence
  Description of Artificial Sequence:  Hypothetical Probe Sequence
gaccctgtgcaaggtatgcgagga

SEQ ID NO: 3456 - DNA, 24 bp, Artificial Sequence
  Description of Artificial Sequence:  Hypothetical Probe Sequence
gaccccatttgagcaagtgcgacc

SEQ ID NO: 3457 - DNA, 24 bp, Artificial Sequence
  Description of Artificial Sequence:  Hypothetical Probe Sequence
gaccccatggtacttgtgcgcacg

SEQ ID NO: 3458 - DNA, 24 bp, Artificial Sequence
  Description of Artificial Sequence:  Hypothetical Probe Sequence
gaccccatcacggagtgacctgcg

SEQ ID NO: 3459 - DNA, 24 bp, Artificial Sequence
  Description of Artificial Sequence:  Hypothetical Probe Sequence
gaccccatacggggtacacggacc

SEQ ID NO: 3460 - DNA, 24 bp, Artificial Sequence
  Description of Artificial Sequence:  Hypothetical Probe Sequence
gacccgaattgaaggatccccgtt

SEQ ID NO: 3461 - DNA, 24 bp, Artificial Sequence
  Description of Artificial Sequence:  Hypothetical Probe Sequence
gacccgaaggtaccatcgaaagcc

SEQ ID NO: 3462 - DNA, 24 bp, Artificial Sequence
  Description of Artificial Sequence:  Hypothetical Probe Sequence
gacccgaaatcggcttctcacgtt

SEQ ID NO: 3463 - DNA, 24 bp, Artificial Sequence
  Description of Artificial Sequence:  Hypothetical Probe Sequence
gacccgaaacgggcttaggacacg

SEQ ID NO: 3464 - DNA, 24 bp, Artificial Sequence
  Description of Artificial Sequence:  Hypothetical Probe Sequence
gaccgctttgatggtaatcgccat

SEQ ID NO: 3465 - DNA, 24 bp, Artificial Sequence
  Description of Artificial Sequence:  Hypothetical Probe Sequence
gaccgctttgtcggaccagcgtgc

SEQ ID NO: 3466 - DNA, 24 bp, Artificial Sequence
  Description of Artificial Sequence:  Hypothetical Probe Sequence
gaccgcttctgtccatgagttgcg

SEQ ID NO: 3467 - DNA, 24 bp, Artificial Sequence
  Description of Artificial Sequence:  Hypothetical Probe Sequence
gaccgcttgcttacggaaaggatg

SEQ ID NO: 3468 - DNA, 24 bp, Artificial Sequence
  Description of Artificial Sequence:  Hypothetical Probe Sequence
gaccgcttatcgaatcggtatgcg

SEQ ID NO: 3469 - DNA, 24 bp, Artificial Sequence
  Description of Artificial Sequence:  Hypothetical Probe Sequence
gaccgcttcctaaggaagccgtct

SEQ ID NO: 3470 - DNA, 24 bp, Artificial Sequence
  Description of Artificial Sequence:  Hypothetical Probe Sequence
gaccgctttgcgtcgtgtgcacct

SEQ ID NO: 3471 - DNA, 24 bp, Artificial Sequence
  Description of Artificial Sequence:  Hypothetical Probe Sequence
gaccgcttgtgcaatccgttggta

SEQ ID NO: 3472 - DNA, 24 bp, Artificial Sequence
  Description of Artificial Sequence:  Hypothetical Probe Sequence
gaccggtattgatgcgacggacgg

SEQ ID NO: 3473 - DNA, 24 bp, Artificial Sequence
  Description of Artificial Sequence:  Hypothetical Probe Sequence
gaccggtacgttggacctcatgcg

SEQ ID NO: 3474 - DNA, 24 bp, Artificial Sequence
  Description of Artificial Sequence:  Hypothetical Probe Sequence
gaccggtacgaagaccggactcgt

SEQ ID NO: 3475 - DNA, 24 bp, Artificial Sequence
  Description of Artificial Sequence:  Hypothetical Probe Sequence
gaccggtagcttcacgaatcgcaa

SEQ ID NO: 3476 - DNA, 24 bp, Artificial Sequence
  Description of Artificial Sequence:  Hypothetical Probe Sequence
gaccggtaggtagctttccccacg

SEQ ID NO: 3477 - DNA, 24 bp, Artificial Sequence
  Description of Artificial Sequence:  Hypothetical Probe Sequence
gaccggtaaggaaggaacggccta

SEQ ID NO: 3478 - DNA, 24 bp, Artificial Sequence
  Description of Artificial Sequence:  Hypothetical Probe Sequence
gaccggtatgcgtgcgtgattctg

SEQ ID NO: 3479 - DNA, 24 bp, Artificial Sequence
  Description of Artificial Sequence:  Hypothetical Probe Sequence
gaccgtcttcgtttgaagccgcaa

SEQ ID NO: 3480 - DNA, 24 bp, Artificial Sequence
  Description of Artificial Sequence:  Hypothetical Probe Sequence
gaccgtctcgaacagcatcgtcgt

SEQ ID NO: 3481 - DNA, 24 bp, Artificial Sequence
  Description of Artificial Sequence:  Hypothetical Probe Sequence
gaccgtctgctttgatggacgctt

SEQ ID NO: 3482 - DNA, 24 bp, Artificial Sequence
  Description of Artificial Sequence:  Hypothetical Probe Sequence
gaccgtctgaccgtgccttgtccc

SEQ ID NO: 3483 - DNA, 24 bp, Artificial Sequence
  Description of Artificial Sequence:  Hypothetical Probe Sequence
gaccgagtggtaaaagacggcagc

SEQ ID NO: 3484 - DNA, 24 bp, Artificial Sequence
  Description of Artificial Sequence:  Hypothetical Probe Sequence
gaccgagtgtgccgttgcaaccat

SEQ ID NO: 3485 - DNA, 24 bp, Artificial Sequence
  Description of Artificial Sequence:  Hypothetical Probe Sequence
gaccgagtggacacggtcgtccat

SEQ ID NO: 3486 - DNA, 24 bp, Artificial Sequence
  Description of Artificial Sequence:  Hypothetical Probe Sequence
gaccgagtagccgatgcagcgatg

SEQ ID NO: 3487 - DNA, 24 bp, Artificial Sequence
  Description of Artificial Sequence:  Hypothetical Probe Sequence
gaccgcaatgatacggcgaacagc

SEQ ID NO: 3488 - DNA, 24 bp, Artificial Sequence
  Description of Artificial Sequence:  Hypothetical Probe Sequence
gaccgcaaaatctgtcctgttgcg

SEQ ID NO: 3489 - DNA, 24 bp, Artificial Sequence
  Description of Artificial Sequence:  Hypothetical Probe Sequence
gaccgcaatctgtgattcccggta

SEQ ID NO: 3490 - DNA, 24 bp, Artificial Sequence
  Description of Artificial Sequence:  Hypothetical Probe Sequence
gaccgcaacttgtgatgtgcgacc

SEQ ID NO: 3491 - DNA, 24 bp, Artificial Sequence
  Description of Artificial Sequence:  Hypothetical Probe Sequence
gaccgcaagcttttgatccccttg

SEQ ID NO: 3492 - DNA, 24 bp, Artificial Sequence
  Description of Artificial Sequence:  Hypothetical Probe Sequence
gaccgcaagtctcacgcgttcacg

SEQ ID NO: 3493 - DNA, 24 bp, Artificial Sequence
  Description of Artificial Sequence:  Hypothetical Probe Sequence
gaccgcaagagttgatggacacgg

SEQ ID NO: 3494 - DNA, 24 bp, Artificial Sequence
  Description of Artificial Sequence:  Hypothetical Probe Sequence
gaccgcaaagtggatggatgcgtt

SEQ ID NO: 3495 - DNA, 24 bp, Artificial Sequence
  Description of Artificial Sequence:  Hypothetical Probe Sequence
gaccgcaatcccccattccctgat

SEQ ID NO: 3496 - DNA, 24 bp, Artificial Sequence
  Description of Artificial Sequence:  Hypothetical Probe Sequence
gaccagtgtgcggagtgaccgcaa

SEQ ID NO: 3497 - DNA, 24 bp, Artificial Sequence
  Description of Artificial Sequence:  Hypothetical Probe Sequence
gaccagtgcacgctcacacggcaa

SEQ ID NO: 3498 - DNA, 24 bp, Artificial Sequence
  Description of Artificial Sequence:  Hypothetical Probe Sequence
gaccagtgagccgaccgacccgtt

SEQ ID NO: 3499 - DNA, 24 bp, Artificial Sequence
  Description of Artificial Sequence:  Hypothetical Probe Sequence
gaccacctcacggatgccatcacg

SEQ ID NO: 3500 - DNA, 24 bp, Artificial Sequence
  Description of Artificial Sequence:  Hypothetical Probe Sequence
gaccacctacgggcttagcccgaa

SEQ ID NO: 3501 - DNA, 24 bp, Artificial Sequence
  Description of Artificial Sequence:  Hypothetical Probe Sequence
gaccatcgctcaagccctcaggac

SEQ ID NO: 3502 - DNA, 24 bp, Artificial Sequence
  Description of Artificial Sequence:  Hypothetical Probe Sequence
gaccatcgcgaatcccctgtttga

SEQ ID NO: 3503 - DNA, 24 bp, Artificial Sequence
  Description of Artificial Sequence:  Hypothetical Probe Sequence
gaccaggaccatacggccattgat

SEQ ID NO: 3504 - DNA, 24 bp, Artificial Sequence
  Description of Artificial Sequence:  Hypothetical Probe Sequence
gaccaggaatcgcgaagatggacc

SEQ ID NO: 3505 - DNA, 24 bp, Artificial Sequence
  Description of Artificial Sequence:  Hypothetical Probe Sequence
gaccaggatcccgcttgagttccc

SEQ ID NO: 3506 - DNA, 24 bp, Artificial Sequence
  Description of Artificial Sequence:  Hypothetical Probe Sequence
gaccaggagtgccttggcttgcaa

SEQ ID NO: 3507 - DNA, 24 bp, Artificial Sequence
  Description of Artificial Sequence:  Hypothetical Probe Sequence
gacccctacttgccatcacggtgc

SEQ ID NO: 3508 - DNA, 24 bp, Artificial Sequence
  Description of Artificial Sequence:  Hypothetical Probe Sequence
gacccctacgttaggaacgggacc

SEQ ID NO: 3509 - DNA, 24 bp, Artificial Sequence
  Description of Artificial Sequence:  Hypothetical Probe Sequence
gacccctacgaaggtaagcccagc

SEQ ID NO: 3510 - DNA, 24 bp, Artificial Sequence
  Description of Artificial Sequence:  Hypothetical Probe Sequence
gacccctagcaacacgacggagcc

SEQ ID NO: 3511 - DNA, 24 bp, Artificial Sequence
  Description of Artificial Sequence:  Hypothetical Probe Sequence
gacccctagtgctgtcaggatgcg

SEQ ID NO: 3512 - DNA, 24 bp, Artificial Sequence
  Description of Artificial Sequence:  Hypothetical Probe Sequence
gacccctaggacagccgcaaccat

SEQ ID NO: 3513 - DNA, 24 bp, Artificial Sequence
  Description of Artificial Sequence:  Hypothetical Probe Sequence
gaccgatgatcgtgcgcctagtgc

SEQ ID NO: 3514 - DNA, 24 bp, Artificial Sequence
  Description of Artificial Sequence:  Hypothetical Probe Sequence
gaccgatgaggaatcgggacgatg

SEQ ID NO: 3515 - DNA, 24 bp, Artificial Sequence
  Description of Artificial Sequence:  Hypothetical Probe Sequence
gaccgatgtgcgtcgtatcgtcgt

SEQ ID NO: 3516 - DNA, 24 bp, Artificial Sequence
  Description of Artificial Sequence:  Hypothetical Probe Sequence
gaccgatgcagccctacacgatcg

SEQ ID NO: 3517 - DNA, 24 bp, Artificial Sequence
  Description of Artificial Sequence:  Hypothetical Probe Sequence
gaccgatggtgccagcaggaagga

SEQ ID NO: 3518 - DNA, 24 bp, Artificial Sequence
  Description of Artificial Sequence:  Hypothetical Probe Sequence
gaccgatgagcctctgggtaacgg

SEQ ID NO: 3519 - DNA, 24 bp, Artificial Sequence
  Description of Artificial Sequence:  Hypothetical Probe Sequence
gacctcccaaagcgaagatgcgtt

SEQ ID NO: 3520 - DNA, 24 bp, Artificial Sequence
  Description of Artificial Sequence:  Hypothetical Probe Sequence
gacctcccagtggtgcgctttcgt

SEQ ID NO: 3521 - DNA, 24 bp, Artificial Sequence
  Description of Artificial Sequence:  Hypothetical Probe Sequence
gacctcccaccttacacgaatgcg

SEQ ID NO: 3522 - DNA, 24 bp, Artificial Sequence
  Description of Artificial Sequence:  Hypothetical Probe Sequence
gacctcccggactctgcgaatgtc

SEQ ID NO: 3523 - DNA, 24 bp, Artificial Sequence
  Description of Artificial Sequence:  Hypothetical Probe Sequence
gacctcccagcccgttgctttctg

SEQ ID NO: 3524 - DNA, 24 bp, Artificial Sequence
  Description of Artificial Sequence:  Hypothetical Probe Sequence
gacctgcgttgagtctacggcgaa

SEQ ID NO: 3525 - DNA, 24 bp, Artificial Sequence
  Description of Artificial Sequence:  Hypothetical Probe Sequence
gacctgcgtcgtacctgatggacc

SEQ ID NO: 3526 - DNA, 24 bp, Artificial Sequence
  Description of Artificial Sequence:  Hypothetical Probe Sequence
gacctgcggagtctgtatcgacgg

SEQ ID NO: 3527 - DNA, 24 bp, Artificial Sequence
  Description of Artificial Sequence:  Hypothetical Probe Sequence
gacctgcgatcggtctaccttgcg

SEQ ID NO: 3528 - DNA, 24 bp, Artificial Sequence
  Description of Artificial Sequence:  Hypothetical Probe Sequence
gacctgcgcctaaggaaaagagcc

SEQ ID NO: 3529 - DNA, 24 bp, Artificial Sequence
  Description of Artificial Sequence:  Hypothetical Probe Sequence
gacctgcgtgcgcgtttgtcagga

SEQ ID NO: 3530 - DNA, 24 bp, Artificial Sequence
  Description of Artificial Sequence:  Hypothetical Probe Sequence
gacctgcggtgccacgaggattga

SEQ ID NO: 3531 - DNA, 24 bp, Artificial Sequence
  Description of Artificial Sequence:  Hypothetical Probe Sequence
gacccacgttagggacgatggcaa

SEQ ID NO: 3532 - DNA, 24 bp, Artificial Sequence
  Description of Artificial Sequence:  Hypothetical Probe Sequence
gacccacgtgtcccatgacccagc

SEQ ID NO: 3533 - DNA, 24 bp, Artificial Sequence
  Description of Artificial Sequence:  Hypothetical Probe Sequence
gacccacgctgtcagcgtctccta

SEQ ID NO: 3534 - DNA, 24 bp, Artificial Sequence
  Description of Artificial Sequence:  Hypothetical Probe Sequence
gacccacgcctatcgtctcaagga

SEQ ID NO: 3535 - DNA, 24 bp, Artificial Sequence
  Description of Artificial Sequence:  Hypothetical Probe Sequence
gacccacgagccgcaagaccagtg

SEQ ID NO: 3536 - DNA, 24 bp, Artificial Sequence
  Description of Artificial Sequence:  Hypothetical Probe Sequence
gacccagcttgatacatgcgcgaa

SEQ ID NO: 3537 - DNA, 24 bp, Artificial Sequence
  Description of Artificial Sequence:  Hypothetical Probe Sequence
gacccagcataccttggcaatgcg

SEQ ID NO: 3538 - DNA, 24 bp, Artificial Sequence
  Description of Artificial Sequence:  Hypothetical Probe Sequence
gacccagctacacttggtgccgtt

SEQ ID NO: 3539 - DNA, 24 bp, Artificial Sequence
  Description of Artificial Sequence:  Hypothetical Probe Sequence
gacccagcggtagctttgtcggta

SEQ ID NO: 3540 - DNA, 24 bp, Artificial Sequence
  Description of Artificial Sequence:  Hypothetical Probe Sequence
gacccagcagtggaccaaagcgaa

SEQ ID NO: 3541 - DNA, 24 bp, Artificial Sequence
  Description of Artificial Sequence:  Hypothetical Probe Sequence
gacccagcgatgccattgtcccat

SEQ ID NO: 3542 - DNA, 24 bp, Artificial Sequence
  Description of Artificial Sequence:  Hypothetical Probe Sequence
gacccagcgtgcaggatgtcgtgc

SEQ ID NO: 3543 - DNA, 24 bp, Artificial Sequence
  Description of Artificial Sequence:  Hypothetical Probe Sequence
gacccagcagccgcaaaatcacct

SEQ ID NO: 3544 - DNA, 24 bp, Artificial Sequence
  Description of Artificial Sequence:  Hypothetical Probe Sequence
gaccgacctgatagccccatatcg

SEQ ID NO: 3545 - DNA, 24 bp, Artificial Sequence
  Description of Artificial Sequence:  Hypothetical Probe Sequence
gaccgaccaaaggtctgaccgcaa

SEQ ID NO: 3546 - DNA, 24 bp, Artificial Sequence
  Description of Artificial Sequence:  Hypothetical Probe Sequence
gaccgacctctgcgaaggactccc

SEQ ID NO: 3547 - DNA, 24 bp, Artificial Sequence
  Description of Artificial Sequence:  Hypothetical Probe Sequence
gaccgaccctgtaaagcagcgtct

SEQ ID NO: 3548 - DNA, 24 bp, Artificial Sequence
  Description of Artificial Sequence:  Hypothetical Probe Sequence
gaccgaccacctgcaacgttacgg

SEQ ID NO: 3549 - DNA, 24 bp, Artificial Sequence
  Description of Artificial Sequence:  Hypothetical Probe Sequence
gaccgaccgtgcctcatctgcacg

SEQ ID NO: 3550 - DNA, 24 bp, Artificial Sequence
  Description of Artificial Sequence:  Hypothetical Probe Sequence
gaccgtgcttaggcttacggccat

SEQ ID NO: 3551 - DNA, 24 bp, Artificial Sequence
  Description of Artificial Sequence:  Hypothetical Probe Sequence
gaccgtgcatactcgtcttgcagc

SEQ ID NO: 3552 - DNA, 24 bp, Artificial Sequence
  Description of Artificial Sequence:  Hypothetical Probe Sequence
gaccgtgccgaaggtaagtgacgg

SEQ ID NO: 3553 - DNA, 24 bp, Artificial Sequence
  Description of Artificial Sequence:  Hypothetical Probe Sequence
gaccgtgcgtctctcaaaaggctt

SEQ ID NO: 3554 - DNA, 24 bp, Artificial Sequence
  Description of Artificial Sequence:  Hypothetical Probe Sequence
gaccgtgcgcaatcgtgtctcacg

SEQ ID NO: 3555 - DNA, 24 bp, Artificial Sequence
  Description of Artificial Sequence:  Hypothetical Probe Sequence
gaccgtgcagtgtctgtgcggctt

SEQ ID NO: 3556 - DNA, 24 bp, Artificial Sequence
  Description of Artificial Sequence:  Hypothetical Probe Sequence
gaccgtgcacctctcacgaaagcc

SEQ ID NO: 3557 - DNA, 24 bp, Artificial Sequence
  Description of Artificial Sequence:  Hypothetical Probe Sequence
gaccgtgcaggaccatggacgagt

SEQ ID NO: 3558 - DNA, 24 bp, Artificial Sequence
  Description of Artificial Sequence:  Hypothetical Probe Sequence
gaccgtgctgcggtctgcaacgtt

SEQ ID NO: 3559 - DNA, 24 bp, Artificial Sequence
  Description of Artificial Sequence:  Hypothetical Probe Sequence
gaccgtgccacgctcacttgacgg

SEQ ID NO: 3560 - DNA, 24 bp, Artificial Sequence
  Description of Artificial Sequence:  Hypothetical Probe Sequence
gaccgtgccagcctcatctgcgtt

SEQ ID NO: 3561 - DNA, 24 bp, Artificial Sequence
  Description of Artificial Sequence:  Hypothetical Probe Sequence
gaccgtgcgtgcgcttgagttgtc

SEQ ID NO: 3562 - DNA, 24 bp, Artificial Sequence
  Description of Artificial Sequence:  Hypothetical Probe Sequence
gaccggaccgttcagcgatgagtg

SEQ ID NO: 3563 - DNA, 24 bp, Artificial Sequence
  Description of Artificial Sequence:  Hypothetical Probe Sequence
gaccggacctgtggaccgttgacc

SEQ ID NO: 3564 - DNA, 24 bp, Artificial Sequence
  Description of Artificial Sequence:  Hypothetical Probe Sequence
gaccggaccgaaaatctgtcacgg

SEQ ID NO: 3565 - DNA, 24 bp, Artificial Sequence
  Description of Artificial Sequence:  Hypothetical Probe Sequence
gaccggacgcaagcaagcaattga

SEQ ID NO: 3566 - DNA, 24 bp, Artificial Sequence
  Description of Artificial Sequence:  Hypothetical Probe Sequence
gaccggacatcgatcgatcgacct

SEQ ID NO: 3567 - DNA, 24 bp, Artificial Sequence
  Description of Artificial Sequence:  Hypothetical Probe Sequence
gaccggaccagcgtctcagcagcc

SEQ ID NO: 3568 - DNA, 24 bp, Artificial Sequence
  Description of Artificial Sequence:  Hypothetical Probe Sequence
gaccggacgaccctcacacggctt

SEQ ID NO: 3569 - DNA, 24 bp, Artificial Sequence
  Description of Artificial Sequence:  Hypothetical Probe Sequence
gaccggacgtgcctcaatcgctgt

SEQ ID NO: 3570 - DNA, 24 bp, Artificial Sequence
  Description of Artificial Sequence:  Hypothetical Probe Sequence
gaccggacacgggtctgcttcgtt

SEQ ID NO: 3571 - DNA, 24 bp, Artificial Sequence
  Description of Artificial Sequence:  Hypothetical Probe Sequence
gaccacggtcgtaatcgatgtccc

SEQ ID NO: 3572 - DNA, 24 bp, Artificial Sequence
  Description of Artificial Sequence:  Hypothetical Probe Sequence
gaccacggcttgatcgtgatgctt

SEQ ID NO: 3573 - DNA, 24 bp, Artificial Sequence
  Description of Artificial Sequence:  Hypothetical Probe Sequence
gaccacggcgttgtctgtgcccta

SEQ ID NO: 3574 - DNA, 24 bp, Artificial Sequence
  Description of Artificial Sequence:  Hypothetical Probe Sequence
gaccacggctgtataccacgtgcg

SEQ ID NO: 3575 - DNA, 24 bp, Artificial Sequence
  Description of Artificial Sequence:  Hypothetical Probe Sequence
gaccacggggtattagacggcttg

SEQ ID NO: 3576 - DNA, 24 bp, Artificial Sequence
  Description of Artificial Sequence:  Hypothetical Probe Sequence
gaccacgggtctaggatgtcgctt

SEQ ID NO: 3577 - DNA, 24 bp, Artificial Sequence
  Description of Artificial Sequence:  Hypothetical Probe Sequence
gaccacgggagtatacagccgtgc

SEQ ID NO: 3578 - DNA, 24 bp, Artificial Sequence
  Description of Artificial Sequence:  Hypothetical Probe Sequence
gaccacggcagctcgtttagagcc

SEQ ID NO: 3579 - DNA, 24 bp, Artificial Sequence
  Description of Artificial Sequence:  Hypothetical Probe Sequence
gaccacggagccagccaccttctg

SEQ ID NO: 3580 - DNA, 24 bp, Artificial Sequence
  Description of Artificial Sequence:  Hypothetical Probe Sequence
gaccagccaatcacggctgttgtc

SEQ ID NO: 3581 - DNA, 24 bp, Artificial Sequence
  Description of Artificial Sequence:  Hypothetical Probe Sequence
gaccagccaaagcgttgcaacttg

SEQ ID NO: 3582 - DNA, 24 bp, Artificial Sequence
  Description of Artificial Sequence:  Hypothetical Probe Sequence
gaccagcctcgtccataatcacgg

SEQ ID NO: 3583 - DNA, 24 bp, Artificial Sequence
  Description of Artificial Sequence:  Hypothetical Probe Sequence
gaccagccccatgcttcgtttgtc

SEQ ID NO: 3584 - DNA, 24 bp, Artificial Sequence
  Description of Artificial Sequence:  Hypothetical Probe Sequence
gaccagccgcttcgaactcagtgc

SEQ ID NO: 3585 - DNA, 24 bp, Artificial Sequence
  Description of Artificial Sequence:  Hypothetical Probe Sequence
gaccagccagtgagccagccccat

SEQ ID NO: 3586 - DNA, 24 bp, Artificial Sequence
  Description of Artificial Sequence:  Hypothetical Probe Sequence
gaccagccatcgtacaatcgcgtt

SEQ ID NO: 3587 - DNA, 24 bp, Artificial Sequence
  Description of Artificial Sequence:  Hypothetical Probe Sequence
gaccagcccctaaatctgcgcttg

SEQ ID NO: 3588 - DNA, 24 bp, Artificial Sequence
  Description of Artificial Sequence:  Hypothetical Probe Sequence
gaccagcctcccggacagtgccat

SEQ ID NO: 3589 - DNA, 24 bp, Artificial Sequence
  Description of Artificial Sequence:  Hypothetical Probe Sequence
gaccagcctgcgtgtccgttctca

SEQ ID NO: 3590 - DNA, 24 bp, Artificial Sequence
  Description of Artificial Sequence:  Hypothetical Probe Sequence
gaccagccgaccgatgctcacgaa

SEQ ID NO: 3591 - DNA, 24 bp, Artificial Sequence
  Description of Artificial Sequence:  Hypothetical Probe Sequence
gtgcttgagcttatcggcaatgcg

SEQ ID NO: 3592 - DNA, 24 bp, Artificial Sequence
  Description of Artificial Sequence:  Hypothetical Probe Sequence
gtgcttgagtgcgtgctgcgcgaa

SEQ ID NO: 3593 - DNA, 24 bp, Artificial Sequence
  Description of Artificial Sequence:  Hypothetical Probe Sequence
gtgctgatccatgtgccttgacgg

SEQ ID NO: 3594 - DNA, 24 bp, Artificial Sequence
  Description of Artificial Sequence:  Hypothetical Probe Sequence
gtgctgatgtgccgtttgcgggac

SEQ ID NO: 3595 - DNA, 24 bp, Artificial Sequence
  Description of Artificial Sequence:  Hypothetical Probe Sequence
gtgcaatccgaacgttggactcgt

SEQ ID NO: 3596 - DNA, 24 bp, Artificial Sequence
  Description of Artificial Sequence:  Hypothetical Probe Sequence
gtgcaatcggtatcgtcgaaatcg

SEQ ID NO: 3597 - DNA, 24 bp, Artificial Sequence
  Description of Artificial Sequence:  Hypothetical Probe Sequence
gtgcaatcgatgagccccatgatg

SEQ ID NO: 3598 - DNA, 24 bp, Artificial Sequence
  Description of Artificial Sequence:  Hypothetical Probe Sequence
gtgcaatctcccgcaaatactgcg

SEQ ID NO: 3599 - DNA, 24 bp, Artificial Sequence
  Description of Artificial Sequence:  Hypothetical Probe Sequence
gtgcaatccacggatgtctgtccc

SEQ ID NO: 3600 - DNA, 24 bp, Artificial Sequence
  Description of Artificial Sequence:  Hypothetical Probe Sequence
gtgcaatccagcagcccacgtctg

SEQ ID NO: 3601 - DNA, 24 bp, Artificial Sequence
  Description of Artificial Sequence:  Hypothetical Probe Sequence
gtgcataccacggcaaatcgggac

SEQ ID NO: 3602 - DNA, 24 bp, Artificial Sequence
  Description of Artificial Sequence:  Hypothetical Probe Sequence
gtgcatacagccacggtgcgtccc

SEQ ID NO: 3603 - DNA, 24 bp, Artificial Sequence
  Description of Artificial Sequence:  Hypothetical Probe Sequence
gtgcaaagtcgtcgaacacgcgaa

SEQ ID NO: 3604 - DNA, 24 bp, Artificial Sequence
  Description of Artificial Sequence:  Hypothetical Probe Sequence
gtgcaaagcctaatcggcaagacc

SEQ ID NO: 3605 - DNA, 24 bp, Artificial Sequence
  Description of Artificial Sequence:  Hypothetical Probe Sequence
gtgcaaagcagccagcagtgagcc

SEQ ID NO: 3606 - DNA, 24 bp, Artificial Sequence
  Description of Artificial Sequence:  Hypothetical Probe Sequence
gtgcaaaggaccatcggcttagcc

SEQ ID NO: 3607 - DNA, 24 bp, Artificial Sequence
  Description of Artificial Sequence:  Hypothetical Probe Sequence
gtgctctgggtaatcgggactgcg

SEQ ID NO: 3608 - DNA, 24 bp, Artificial Sequence
  Description of Artificial Sequence:  Hypothetical Probe Sequence
gtgctctgcctagctttgcgcacg

SEQ ID NO: 3609 - DNA, 24 bp, Artificial Sequence
  Description of Artificial Sequence:  Hypothetical Probe Sequence
gtgctctgtgcgcgttagtgcgaa

SEQ ID NO: 3610 - DNA, 24 bp, Artificial Sequence
  Description of Artificial Sequence:  Hypothetical Probe Sequence
gtgctgtccgaaacggctgtttga

SEQ ID NO: 3611 - DNA, 24 bp, Artificial Sequence
  Description of Artificial Sequence:  Hypothetical Probe Sequence
gtgctgtccacgggacacggggta

SEQ ID NO: 3612 - DNA, 24 bp, Artificial Sequence
  Description of Artificial Sequence:  Hypothetical Probe Sequence
gtgctgtcgaccgacccagcctca

SEQ ID NO: 3613 - DNA, 24 bp, Artificial Sequence
  Description of Artificial Sequence:  Hypothetical Probe Sequence
gtgctgtcacgggtcttcccggac

SEQ ID NO: 3614 - DNA, 24 bp, Artificial Sequence
  Description of Artificial Sequence:  Hypothetical Probe Sequence
gtgctcgttgatagccgcttcacg

SEQ ID NO: 3615 - DNA, 24 bp, Artificial Sequence
  Description of Artificial Sequence:  Hypothetical Probe Sequence
gtgctcgtcttgtgtcacggcgaa

SEQ ID NO: 3616 - DNA, 24 bp, Artificial Sequence
  Description of Artificial Sequence:  Hypothetical Probe Sequence
gtgctcgtaggaaatcagccgcaa

SEQ ID NO: 3617 - DNA, 24 bp, Artificial Sequence
  Description of Artificial Sequence:  Hypothetical Probe Sequence
gtgctcgttccccgttttgacacg

SEQ ID NO: 3618 - DNA, 24 bp, Artificial Sequence
  Description of Artificial Sequence:  Hypothetical Probe Sequence
gtgctcgtggacggacgcttccat

SEQ ID NO: 3619 - DNA, 24 bp, Artificial Sequence
  Description of Artificial Sequence:  Hypothetical Probe Sequence
gtgctcgtagcctctgacggggac

SEQ ID NO: 3620 - DNA, 24 bp, Artificial Sequence
  Description of Artificial Sequence:  Hypothetical Probe Sequence
gtgccttgttgatcccgtgccgtt

SEQ ID NO: 3621 - DNA, 24 bp, Artificial Sequence
  Description of Artificial Sequence:  Hypothetical Probe Sequence
gtgccttgaaaggcaacttgcgaa

SEQ ID NO: 3622 - DNA, 24 bp, Artificial Sequence
  Description of Artificial Sequence:  Hypothetical Probe Sequence
gtgccttggtctggactgcgcgtt

SEQ ID NO: 3623 - DNA, 24 bp, Artificial Sequence
  Description of Artificial Sequence:  Hypothetical Probe Sequence
gtgccttgaggagtgctcccgatg

SEQ ID NO: 3624 - DNA, 24 bp, Artificial Sequence
  Description of Artificial Sequence:  Hypothetical Probe Sequence
gtgccttgcctatcgtatcgtccc

SEQ ID NO: 3625 - DNA, 24 bp, Artificial Sequence
  Description of Artificial Sequence:  Hypothetical Probe Sequence
gtgccttggatggcttcgaacgaa

SEQ ID NO: 3626 - DNA, 24 bp, Artificial Sequence
  Description of Artificial Sequence:  Hypothetical Probe Sequence
gtgccttgcagctgtcagtgccat

SEQ ID NO: 3627 - DNA, 24 bp, Artificial Sequence
  Description of Artificial Sequence:  Hypothetical Probe Sequence
gtgccgttttgaaggagacctgcg

SEQ ID NO: 3628 - DNA, 24 bp, Artificial Sequence
  Description of Artificial Sequence:  Hypothetical Probe Sequence
gtgccgttttagatcggatgcgaa

SEQ ID NO: 3629 - DNA, 24 bp, Artificial Sequence
  Description of Artificial Sequence:  Hypothetical Probe Sequence
gtgccgtttctgtgcgatacgctt

SEQ ID NO: 3630 - DNA, 24 bp, Artificial Sequence
  Description of Artificial Sequence:  Hypothetical Probe Sequence
gtgccgttctgtaatcgtgcagcc

SEQ ID NO: 3631 - DNA, 24 bp, Artificial Sequence
  Description of Artificial Sequence:  Hypothetical Probe Sequence
gtgccgttccatttgacacgtccc

SEQ ID NO: 3632 - DNA, 24 bp, Artificial Sequence
  Description of Artificial Sequence:  Hypothetical Probe Sequence
gtgccgttggtagacccgtttcgt

SEQ ID NO: 3633 - DNA, 24 bp, Artificial Sequence
  Description of Artificial Sequence:  Hypothetical Probe Sequence
gtgccgttgagtagccgcaaccta

SEQ ID NO: 3634 - DNA, 24 bp, Artificial Sequence
  Description of Artificial Sequence:  Hypothetical Probe Sequence
gtgccgttgatgtctggctttcgt

SEQ ID NO: 3635 - DNA, 24 bp, Artificial Sequence
  Description of Artificial Sequence:  Hypothetical Probe Sequence
gtgccgtttcccttagtccccagc

SEQ ID NO: 3636 - DNA, 24 bp, Artificial Sequence
  Description of Artificial Sequence:  Hypothetical Probe Sequence
gtgccgttggacgaccaatcgacc

SEQ ID NO: 3637 - DNA, 24 bp, Artificial Sequence
  Description of Artificial Sequence:  Hypothetical Probe Sequence
gtgcctcattgacacgggtatgcg

SEQ ID NO: 3638 - DNA, 24 bp, Artificial Sequence
  Description of Artificial Sequence:  Hypothetical Probe Sequence
gtgcctcaccatagcccgtttgat

SEQ ID NO: 3639 - DNA, 24 bp, Artificial Sequence
  Description of Artificial Sequence:  Hypothetical Probe Sequence
gtgcctcaagtgggaccagccacg

SEQ ID NO: 3640 - DNA, 24 bp, Artificial Sequence
  Description of Artificial Sequence:  Hypothetical Probe Sequence
gtgcctcacctacttgacgggctt

SEQ ID NO: 3641 - DNA, 24 bp, Artificial Sequence
  Description of Artificial Sequence:  Hypothetical Probe Sequence
gtgcctcatccctgatgatgcacg

SEQ ID NO: 3642 - DNA, 24 bp, Artificial Sequence
  Description of Artificial Sequence:  Hypothetical Probe Sequence
gtgcctcaagcctgatggacgtgc

SEQ ID NO: 3643 - DNA, 24 bp, Artificial Sequence
  Description of Artificial Sequence:  Hypothetical Probe Sequence
gtgcctgttctgtgcgtcccgtgc

SEQ ID NO: 3644 - DNA, 24 bp, Artificial Sequence
  Description of Artificial Sequence:  Hypothetical Probe Sequence
gtgcctgtgatgcacggctttgcg

SEQ ID NO: 3645 - DNA, 24 bp, Artificial Sequence
  Description of Artificial Sequence:  Hypothetical Probe Sequence
gtgcccatttgacgaagtgcatcg

SEQ ID NO: 3646 - DNA, 24 bp, Artificial Sequence
  Description of Artificial Sequence:  Hypothetical Probe Sequence
gtgcccattctgatcgtcccgctt

SEQ ID NO: 3647 - DNA, 24 bp, Artificial Sequence
  Description of Artificial Sequence:  Hypothetical Probe Sequence
gtgcccattgtctgtccagcgctt

SEQ ID NO: 3648 - DNA, 24 bp, Artificial Sequence
  Description of Artificial Sequence:  Hypothetical Probe Sequence
gtgcccattcgtacgggtcttgtc

SEQ ID NO: 3649 - DNA, 24 bp, Artificial Sequence
  Description of Artificial Sequence:  Hypothetical Probe Sequence
gtgcccatctcaatacggacgcaa

SEQ ID NO: 3650 - DNA, 24 bp, Artificial Sequence
  Description of Artificial Sequence:  Hypothetical Probe Sequence
gtgcccataggagtgcgatgccat

SEQ ID NO: 3651 - DNA, 24 bp, Artificial Sequence
  Description of Artificial Sequence:  Hypothetical Probe Sequence
gtgcccatcctacacggaccggta

SEQ ID NO: 3652 - DNA, 24 bp, Artificial Sequence
  Description of Artificial Sequence:  Hypothetical Probe Sequence
gtgcccattgcggagtacggatcg

SEQ ID NO: 3653 - DNA, 24 bp, Artificial Sequence
  Description of Artificial Sequence:  Hypothetical Probe Sequence
gtgcccatcagcctgtaccttgcg

SEQ ID NO: 3654 - DNA, 24 bp, Artificial Sequence
  Description of Artificial Sequence:  Hypothetical Probe Sequence
gtgccgaattgagatggatgcacg

SEQ ID NO: 3655 - DNA, 24 bp, Artificial Sequence
  Description of Artificial Sequence:  Hypothetical Probe Sequence
gtgccgaatgataatccagcccat

SEQ ID NO: 3656 - DNA, 24 bp, Artificial Sequence
  Description of Artificial Sequence:  Hypothetical Probe Sequence
gtgccgaaaatcaatcgagttccc

SEQ ID NO: 3657 - DNA, 24 bp, Artificial Sequence
  Description of Artificial Sequence:  Hypothetical Probe Sequence
gtgccgaaaaagggtatcccatcg

SEQ ID NO: 3658 - DNA, 24 bp, Artificial Sequence
  Description of Artificial Sequence:  Hypothetical Probe Sequence
gtgccgaatgtcgatgtgattgcg

SEQ ID NO: 3659 - DNA, 24 bp, Artificial Sequence
  Description of Artificial Sequence:  Hypothetical Probe Sequence
gtgccgaacgtttgatgaccggta

SEQ ID NO: 3660 - DNA, 24 bp, Artificial Sequence
  Description of Artificial Sequence:  Hypothetical Probe Sequence
gtgccgaaccattcgtcagcgtct

SEQ ID NO: 3661 - DNA, 24 bp, Artificial Sequence
  Description of Artificial Sequence:  Hypothetical Probe Sequence
gtgccgaaagtgaatcgcaacacg

SEQ ID NO: 3662 - DNA, 24 bp, Artificial Sequence
  Description of Artificial Sequence:  Hypothetical Probe Sequence
gtgccgaacacgcgttgagtacgg

SEQ ID NO: 3663 - DNA, 24 bp, Artificial Sequence
  Description of Artificial Sequence:  Hypothetical Probe Sequence
gtgccgaaggacctgtaaagcacg

SEQ ID NO: 3664 - DNA, 24 bp, Artificial Sequence
  Description of Artificial Sequence:  Hypothetical Probe Sequence
gtgccgaaacggccatcgaacttg

SEQ ID NO: 3665 - DNA, 24 bp, Artificial Sequence
  Description of Artificial Sequence:  Hypothetical Probe Sequence
gtgcgcttttagtcgtgtgccagc

SEQ ID NO: 3666 - DNA, 24 bp, Artificial Sequence
  Description of Artificial Sequence:  Hypothetical Probe Sequence
gtgcgcttaaagagtgcacgtcgt

SEQ ID NO: 3667 - DNA, 24 bp, Artificial Sequence
  Description of Artificial Sequence:  Hypothetical Probe Sequence
gtgcgctttacaaaagcacgacgg

SEQ ID NO: 3668 - DNA, 24 bp, Artificial Sequence
  Description of Artificial Sequence:  Hypothetical Probe Sequence
gtgcgcttctcactcaggaccacg

SEQ ID NO: 3669 - DNA, 24 bp, Artificial Sequence
  Description of Artificial Sequence:  Hypothetical Probe Sequence
gtgcgcttggtagtctacggtccc

SEQ ID NO: 3670 - DNA, 24 bp, Artificial Sequence
  Description of Artificial Sequence:  Hypothetical Probe Sequence
gtgcgcttaggaccatcgttagcc

SEQ ID NO: 3671 - DNA, 24 bp, Artificial Sequence
  Description of Artificial Sequence:  Hypothetical Probe Sequence
gtgcgcttgatgcttgggtacgaa

SEQ ID NO: 3672 - DNA, 24 bp, Artificial Sequence
  Description of Artificial Sequence:  Hypothetical Probe Sequence
gtgcgctttccccgaattgagacc

SEQ ID NO: 3673 - DNA, 24 bp, Artificial Sequence
  Description of Artificial Sequence:  Hypothetical Probe Sequence
gtgcgcttgacctctgggtaacct

SEQ ID NO: 3674 - DNA, 24 bp, Artificial Sequence
  Description of Artificial Sequence:  Hypothetical Probe Sequence
gtgcgcttggactgtcgatgctca

SEQ ID NO: 3675 - DNA, 24 bp, Artificial Sequence
  Description of Artificial Sequence:  Hypothetical Probe Sequence
gtgcggtaaaaggaccggacggta

SEQ ID NO: 3676 - DNA, 24 bp, Artificial Sequence
  Description of Artificial Sequence:  Hypothetical Probe Sequence
gtgcggtacgtttctggaccgctt

SEQ ID NO: 3677 - DNA, 24 bp, Artificial Sequence
  Description of Artificial Sequence:  Hypothetical Probe Sequence
gtgcggtacgaatgcgaggaagcc

SEQ ID NO: 3678 - DNA, 24 bp, Artificial Sequence
  Description of Artificial Sequence:  Hypothetical Probe Sequence
gtgcggtagcaaaggacagcccat

SEQ ID NO: 3679 - DNA, 24 bp, Artificial Sequence
  Description of Artificial Sequence:  Hypothetical Probe Sequence
gtgcggtacctaacgggtgccagc

SEQ ID NO: 3680 - DNA, 24 bp, Artificial Sequence
  Description of Artificial Sequence:  Hypothetical Probe Sequence
gtgcggtaagccggactctggtgc

SEQ ID NO: 3681 - DNA, 24 bp, Artificial Sequence
  Description of Artificial Sequence:  Hypothetical Probe Sequence
gtgcgtctttgacctatgcgtccc

SEQ ID NO: 3682 - DNA, 24 bp, Artificial Sequence
  Description of Artificial Sequence:  Hypothetical Probe Sequence
gtgcgtcttgtcgcaacgaaacgg

SEQ ID NO: 3683 - DNA, 24 bp, Artificial Sequence
  Description of Artificial Sequence:  Hypothetical Probe Sequence
gtgcgtctggtaatcggtgcccat

SEQ ID NO: 3684 - DNA, 24 bp, Artificial Sequence
  Description of Artificial Sequence:  Hypothetical Probe Sequence
gtgcgtctatcggcttacggtccc

SEQ ID NO: 3685 - DNA, 24 bp, Artificial Sequence
  Description of Artificial Sequence:  Hypothetical Probe Sequence
gtgcgtctgatgcttggtgccacg

SEQ ID NO: 3686 - DNA, 24 bp, Artificial Sequence
  Description of Artificial Sequence:  Hypothetical Probe Sequence
gtgcgtcttcccgtctgcttacgg

SEQ ID NO: 3687 - DNA, 24 bp, Artificial Sequence
  Description of Artificial Sequence:  Hypothetical Probe Sequence
gtgcgagtaggagcaatgcgggta

SEQ ID NO: 3688 - DNA, 24 bp, Artificial Sequence
  Description of Artificial Sequence:  Hypothetical Probe Sequence
gtgcgagtgatgcagccagcacgg

SEQ ID NO: 3689 - DNA, 24 bp, Artificial Sequence
  Description of Artificial Sequence:  Hypothetical Probe Sequence
gtgcgagttcccgtctcagcgacc

SEQ ID NO: 3690 - DNA, 24 bp, Artificial Sequence
  Description of Artificial Sequence:  Hypothetical Probe Sequence
gtgcgagttgcgaatccgttatcg

SEQ ID NO: 3691 - DNA, 24 bp, Artificial Sequence
  Description of Artificial Sequence:  Hypothetical Probe Sequence
gtgcgcaattgattagagccagcc

SEQ ID NO: 3692 - DNA, 24 bp, Artificial Sequence
  Description of Artificial Sequence:  Hypothetical Probe Sequence
gtgcgcaaataccagcaaagtgcg

SEQ ID NO: 3693 - DNA, 24 bp, Artificial Sequence
  Description of Artificial Sequence:  Hypothetical Probe Sequence
gtgcgcaatacaagccctgttgcg

SEQ ID NO: 3694 - DNA, 24 bp, Artificial Sequence
  Description of Artificial Sequence:  Hypothetical Probe Sequence
gtgcgcaatgtctctgggaccacg

SEQ ID NO: 3695 - DNA, 24 bp, Artificial Sequence
  Description of Artificial Sequence:  Hypothetical Probe Sequence
gtgcgcaactcaggacatcgctgt

SEQ ID NO: 3696 - DNA, 24 bp, Artificial Sequence
  Description of Artificial Sequence:  Hypothetical Probe Sequence
gtgcgcaactgtgatggacccgaa

SEQ ID NO: 3697 - DNA, 24 bp, Artificial Sequence
  Description of Artificial Sequence:  Hypothetical Probe Sequence
gtgcgcaaggtatacagcaaacgg

SEQ ID NO: 3698 - DNA, 24 bp, Artificial Sequence
  Description of Artificial Sequence:  Hypothetical Probe Sequence
gtgcgcaaagtgatacaggatgcg

SEQ ID NO: 3699 - DNA, 24 bp, Artificial Sequence
  Description of Artificial Sequence:  Hypothetical Probe Sequence
gtgcgcaaaccttcgtgaccgagt

SEQ ID NO: 3700 - DNA, 24 bp, Artificial Sequence
  Description of Artificial Sequence:  Hypothetical Probe Sequence
gtgcgcaaatcgtacacacggacc

SEQ ID NO: 3701 - DNA, 24 bp, Artificial Sequence
  Description of Artificial Sequence:  Hypothetical Probe Sequence
gtgcgcaagatgagtgacggtccc

SEQ ID NO: 3702 - DNA, 24 bp, Artificial Sequence
  Description of Artificial Sequence:  Hypothetical Probe Sequence
gtgcgcaatgcggcttggacagtg

SEQ ID NO: 3703 - DNA, 24 bp, Artificial Sequence
  Description of Artificial Sequence:  Hypothetical Probe Sequence
gtgcgcaagtgcaggacgttttga

SEQ ID NO: 3704 - DNA, 24 bp, Artificial Sequence
  Description of Artificial Sequence:  Hypothetical Probe Sequence
gtgcagtggcttacggcctaagga

SEQ ID NO: 3705 - DNA, 24 bp, Artificial Sequence
  Description of Artificial Sequence:  Hypothetical Probe Sequence
gtgcagtggatggcaatgcgccat

SEQ ID NO: 3706 - DNA, 24 bp, Artificial Sequence
  Description of Artificial Sequence:  Hypothetical Probe Sequence
gtgcagtgtgcggctttgtctgcg

SEQ ID NO: 3707 - DNA, 24 bp, Artificial Sequence
  Description of Artificial Sequence:  Hypothetical Probe Sequence
gtgcagtgggacatcggatgtccc

SEQ ID NO: 3708 - DNA, 24 bp, Artificial Sequence
  Description of Artificial Sequence:  Hypothetical Probe Sequence
gtgcagtgacggcagcgtctcacg

SEQ ID NO: 3709 - DNA, 24 bp, Artificial Sequence
  Description of Artificial Sequence:  Hypothetical Probe Sequence
gtgcagtgagccaatcgaccgacc

SEQ ID NO: 3710 - DNA, 24 bp, Artificial Sequence
  Description of Artificial Sequence:  Hypothetical Probe Sequence
gtgcacctgatgacgggtgcgtgc

SEQ ID NO: 3711 - DNA, 24 bp, Artificial Sequence
  Description of Artificial Sequence:  Hypothetical Probe Sequence
gtgcacctcacgcacgaatccgaa

SEQ ID NO: 3712 - DNA, 24 bp, Artificial Sequence
  Description of Artificial Sequence:  Hypothetical Probe Sequence
gtgcacctacggccatttgatccc

SEQ ID NO: 3713 - DNA, 24 bp, Artificial Sequence
  Description of Artificial Sequence:  Hypothetical Probe Sequence
gtgcatcgtgatcagcacgggcaa

SEQ ID NO: 3714 - DNA, 24 bp, Artificial Sequence
  Description of Artificial Sequence:  Hypothetical Probe Sequence
gtgcatcgcttgctcaacggggac

SEQ ID NO: 3715 - DNA, 24 bp, Artificial Sequence
  Description of Artificial Sequence:  Hypothetical Probe Sequence
gtgcatcgctgtttagagcctgcg

SEQ ID NO: 3716 - DNA, 24 bp, Artificial Sequence
  Description of Artificial Sequence:  Hypothetical Probe Sequence
gtgcatcggtctgtgcgaccgatg

SEQ ID NO: 3717 - DNA, 24 bp, Artificial Sequence
  Description of Artificial Sequence:  Hypothetical Probe Sequence
gtgcatcgaccttgcgcacggagt

SEQ ID NO: 3718 - DNA, 24 bp, Artificial Sequence
  Description of Artificial Sequence:  Hypothetical Probe Sequence
gtgcatcgatcgtgatagccgacc

SEQ ID NO: 3719 - DNA, 24 bp, Artificial Sequence
  Description of Artificial Sequence:  Hypothetical Probe Sequence
gtgcatcgtccccttgtccctccc

SEQ ID NO: 3720 - DNA, 24 bp, Artificial Sequence
  Description of Artificial Sequence:  Hypothetical Probe Sequence
gtgcatcgcacgcacggcttaatc

SEQ ID NO: 3721 - DNA, 24 bp, Artificial Sequence
  Description of Artificial Sequence:  Hypothetical Probe Sequence
gtgcatcgcagccgtttcgtagga

SEQ ID NO: 3722 - DNA, 24 bp, Artificial Sequence
  Description of Artificial Sequence:  Hypothetical Probe Sequence
gtgcatcgacgggcaatgatgacc

SEQ ID NO: 3723 - DNA, 24 bp, Artificial Sequence
  Description of Artificial Sequence:  Hypothetical Probe Sequence
gtgcaggatcgttgtctcccgcaa

SEQ ID NO: 3724 - DNA, 24 bp, Artificial Sequence
  Description of Artificial Sequence:  Hypothetical Probe Sequence
gtgcaggacttgcgaaatcgagcc

SEQ ID NO: 3725 - DNA, 24 bp, Artificial Sequence
  Description of Artificial Sequence:  Hypothetical Probe Sequence
gtgcaggagcttgcttcgttacgg

SEQ ID NO: 3726 - DNA, 24 bp, Artificial Sequence
  Description of Artificial Sequence:  Hypothetical Probe Sequence
gtgcaggaaggaaatcgacccgaa

SEQ ID NO: 3727 - DNA, 24 bp, Artificial Sequence
  Description of Artificial Sequence:  Hypothetical Probe Sequence
gtgcaggacacgtgtcgcaacgtt

SEQ ID NO: 3728 - DNA, 24 bp, Artificial Sequence
  Description of Artificial Sequence:  Hypothetical Probe Sequence
gtgcaggacagccgaacgaagctt

SEQ ID NO: 3729 - DNA, 24 bp, Artificial Sequence
  Description of Artificial Sequence:  Hypothetical Probe Sequence
gtgcaggagacccgaagaccacgg

SEQ ID NO: 3730 - DNA, 24 bp, Artificial Sequence
  Description of Artificial Sequence:  Hypothetical Probe Sequence
gtgcaggagtgccgttagccacct

SEQ ID NO: 3731 - DNA, 24 bp, Artificial Sequence
  Description of Artificial Sequence:  Hypothetical Probe Sequence
gtgcaggaacggctgtcgttagcc

SEQ ID NO: 3732 - DNA, 24 bp, Artificial Sequence
  Description of Artificial Sequence:  Hypothetical Probe Sequence
gtgccctaaaaggacctcccgatg

SEQ ID NO: 3733 - DNA, 24 bp, Artificial Sequence
  Description of Artificial Sequence:  Hypothetical Probe Sequence
gtgccctatgtccgaaatcgcacg

SEQ ID NO: 3734 - DNA, 24 bp, Artificial Sequence
  Description of Artificial Sequence:  Hypothetical Probe Sequence
gtgccctacgttggtagctttgcg

SEQ ID NO: 3735 - DNA, 24 bp, Artificial Sequence
  Description of Artificial Sequence:  Hypothetical Probe Sequence
gtgccctaccattctgcacgcgaa

SEQ ID NO: 3736 - DNA, 24 bp, Artificial Sequence
  Description of Artificial Sequence:  Hypothetical Probe Sequence
gtgccctagacctgtcgcaaacgg

SEQ ID NO: 3737 - DNA, 24 bp, Artificial Sequence
  Description of Artificial Sequence:  Hypothetical Probe Sequence
gtgccctaagcctcgtctgttccc

SEQ ID NO: 3738 - DNA, 24 bp, Artificial Sequence
  Description of Artificial Sequence:  Hypothetical Probe Sequence
gtgcgatgtgatatcgcgaaatcg

SEQ ID NO: 3739 - DNA, 24 bp, Artificial Sequence
  Description of Artificial Sequence:  Hypothetical Probe Sequence
gtgcgatgtctgtgcgagccgacc

SEQ ID NO: 3740 - DNA, 24 bp, Artificial Sequence
  Description of Artificial Sequence:  Hypothetical Probe Sequence
gtgcgatgcttggcaattaggcaa

SEQ ID NO: 3741 - DNA, 24 bp, Artificial Sequence
  Description of Artificial Sequence:  Hypothetical Probe Sequence
gtgcgatgatcgctgtgtgcgacc

SEQ ID NO: 3742 - DNA, 24 bp, Artificial Sequence
  Description of Artificial Sequence:  Hypothetical Probe Sequence
gtgcgatgtcccggacgcaaaatc

SEQ ID NO: 3743 - DNA, 24 bp, Artificial Sequence
  Description of Artificial Sequence:  Hypothetical Probe Sequence
gtgctcccttagcttggtgctgcg

SEQ ID NO: 3744 - DNA, 24 bp, Artificial Sequence
  Description of Artificial Sequence:  Hypothetical Probe Sequence
gtgctccccttggagttgattgcg

SEQ ID NO: 3745 - DNA, 24 bp, Artificial Sequence
  Description of Artificial Sequence:  Hypothetical Probe Sequence
gtgctccccgttctgtctgttgcg

SEQ ID NO: 3746 - DNA, 24 bp, Artificial Sequence
  Description of Artificial Sequence:  Hypothetical Probe Sequence
gtgctcccgagttacagtgccacg

SEQ ID NO: 3747 - DNA, 24 bp, Artificial Sequence
  Description of Artificial Sequence:  Hypothetical Probe Sequence
gtgctcccacctgacccctatccc

SEQ ID NO: 3748 - DNA, 24 bp, Artificial Sequence
  Description of Artificial Sequence:  Hypothetical Probe Sequence
gtgctcccatcgatcgcgttagga

SEQ ID NO: 3749 - DNA, 24 bp, Artificial Sequence
  Description of Artificial Sequence:  Hypothetical Probe Sequence
gtgctcccgtgcagtgtcccggta

SEQ ID NO: 3750 - DNA, 24 bp, Artificial Sequence
  Description of Artificial Sequence:  Hypothetical Probe Sequence
gtgctcccggacttgagtgcgagt

SEQ ID NO: 3751 - DNA, 24 bp, Artificial Sequence
  Description of Artificial Sequence:  Hypothetical Probe Sequence
gtgctcccagccgtcttctgcacg

SEQ ID NO: 3752 - DNA, 24 bp, Artificial Sequence
  Description of Artificial Sequence:  Hypothetical Probe Sequence
gtgctgcgtctgtctgcacgagga

SEQ ID NO: 3753 - DNA, 24 bp, Artificial Sequence
  Description of Artificial Sequence:  Hypothetical Probe Sequence
gtgctgcgctgtgcaaaatcccta

SEQ ID NO: 3754 - DNA, 24 bp, Artificial Sequence
  Description of Artificial Sequence:  Hypothetical Probe Sequence
gtgctgcggagtaaagagccccta

SEQ ID NO: 3755 - DNA, 24 bp, Artificial Sequence
  Description of Artificial Sequence:  Hypothetical Probe Sequence
gtgctgcgtccctacacagctccc

SEQ ID NO: 3756 - DNA, 24 bp, Artificial Sequence
  Description of Artificial Sequence:  Hypothetical Probe Sequence
gtgctgcgcacggcttgtctgtgc

SEQ ID NO: 3757 - DNA, 24 bp, Artificial Sequence
  Description of Artificial Sequence:  Hypothetical Probe Sequence
gtgctgcgcagcaaagcacgtgtc

SEQ ID NO: 3758 - DNA, 24 bp, Artificial Sequence
  Description of Artificial Sequence:  Hypothetical Probe Sequence
gtgctgcggacctctgagtgtgcg

SEQ ID NO: 3759 - DNA, 24 bp, Artificial Sequence
  Description of Artificial Sequence:  Hypothetical Probe Sequence
gtgctgcgagccgcaagatgcttg

SEQ ID NO: 3760 - DNA, 24 bp, Artificial Sequence
  Description of Artificial Sequence:  Hypothetical Probe Sequence
gtgccacgttaggtgcgtgcccat

SEQ ID NO: 3761 - DNA, 24 bp, Artificial Sequence
  Description of Artificial Sequence:  Hypothetical Probe Sequence
gtgccacgtctgagtggaccccat

SEQ ID NO: 3762 - DNA, 24 bp, Artificial Sequence
  Description of Artificial Sequence:  Hypothetical Probe Sequence
gtgccacgggtaacctaggatccc

SEQ ID NO: 3763 - DNA, 24 bp, Artificial Sequence
  Description of Artificial Sequence:  Hypothetical Probe Sequence
gtgccacggagtacgggagtgacc

SEQ ID NO: 3764 - DNA, 24 bp, Artificial Sequence
  Description of Artificial Sequence:  Hypothetical Probe Sequence
gtgccacgagtgtgtcatcgggac

SEQ ID NO: 3765 - DNA, 24 bp, Artificial Sequence
  Description of Artificial Sequence:  Hypothetical Probe Sequence
gtgccacgagccaatcctcacacg

SEQ ID NO: 3766 - DNA, 24 bp, Artificial Sequence
  Description of Artificial Sequence:  Hypothetical Probe Sequence
gtgccagctgatagccaaaggctt

SEQ ID NO: 3767 - DNA, 24 bp, Artificial Sequence
  Description of Artificial Sequence:  Hypothetical Probe Sequencetes sp.
gtgccagcaatcaaagggtaacgg

SEQ ID NO: 3768 - DNA, 24 bp, Artificial Sequence
  Description of Artificial Sequence:  Hypothetical Probe Sequence
gtgccagcataccagcgatgcgtt

SEQ ID NO: 3769 - DNA, 24 bp, Artificial Sequence
  Description of Artificial Sequence:  Hypothetical Probe Sequence
gtgccagcaaaggtctgtgcagga

SEQ ID NO: 3770 - DNA, 24 bp, Artificial Sequence
  Description of Artificial Sequence:  Hypothetical Probe Sequence
gtgccagccgaattagtgcgatcg

SEQ ID NO: 3771 - DNA, 24 bp, Artificial Sequence
  Description of Artificial Sequence:  Hypothetical Probe Sequence
gtgccagcgtcttgtcgtgcttga

SEQ ID NO: 3772 - DNA, 24 bp, Artificial Sequence
  Description of Artificial Sequence:  Hypothetical Probe Sequence
gtgccagcgagtttaggtgcagcc

SEQ ID NO: 3773 - DNA, 24 bp, Artificial Sequence
  Description of Artificial Sequence:  Hypothetical Probe Sequence
gtgccagccctaaatcggacccta

SEQ ID NO: 3774 - DNA, 24 bp, Artificial Sequence
  Description of Artificial Sequence:  Hypothetical Probe Sequence
gtgccagctcccctcacttgccat

SEQ ID NO: 3775 - DNA, 24 bp, Artificial Sequence
  Description of Artificial Sequence:  Hypothetical Probe Sequence
gtgccagcgtgcagtggcaacttg

SEQ ID NO: 3776 - DNA, 24 bp, Artificial Sequence
  Description of Artificial Sequence:  Hypothetical Probe Sequence
gtgccagcacggaaagatcggatg

SEQ ID NO: 3777 - DNA, 24 bp, Artificial Sequence
  Description of Artificial Sequence:  Hypothetical Probe Sequence
gtgcgaccttaggtgcggtatgcg

SEQ ID NO: 3778 - DNA, 24 bp, Artificial Sequence
  Description of Artificial Sequence:  Hypothetical Probe Sequence
gtgcgaccatacagccggaccgaa

SEQ ID NO: 3779 - DNA, 24 bp, Artificial Sequence
  Description of Artificial Sequence:  Hypothetical Probe Sequence
gtgcgaccctgtttagcagcgagt

SEQ ID NO: 3780 - DNA, 24 bp, Artificial Sequence
  Description of Artificial Sequence:  Hypothetical Probe Sequence
gtgcgacccgaaagcctgtcacct

SEQ ID NO: 3781 - DNA, 24 bp, Artificial Sequence
  Description of Artificial Sequence:  Hypothetical Probe Sequence
gtgcgaccgcttataccagcagcc

SEQ ID NO: 3782 - DNA, 24 bp, Artificial Sequence
  Description of Artificial Sequence:  Hypothetical Probe Sequence
gtgcgaccggtaggacggtagctt

SEQ ID NO: 3783 - DNA, 24 bp, Artificial Sequence
  Description of Artificial Sequence:  Hypothetical Probe Sequence
gtgcgaccagtggatgcacgctca

SEQ ID NO: 3784 - DNA, 24 bp, Artificial Sequence
  Description of Artificial Sequence:  Hypothetical Probe Sequence
gtgcgaccaggaagccacctgagt

SEQ ID NO: 3785 - DNA, 24 bp, Artificial Sequence
  Description of Artificial Sequence:  Hypothetical Probe Sequence
gtgcgacccagcgagtagcccttg

SEQ ID NO: 3786 - DNA, 24 bp, Artificial Sequence
  Description of Artificial Sequence:  Hypothetical Probe Sequence
gtgcgaccacggctcaatcgtcgt

SEQ ID NO: 3787 - DNA, 24 bp, Artificial Sequence
  Description of Artificial Sequence:  Hypothetical Probe Sequence
gtgcgtgcttgacgaaggacagcc

SEQ ID NO: 3788 - DNA, 24 bp, Artificial Sequence
  Description of Artificial Sequence:  Hypothetical Probe Sequence
gtgcgtgctgattcccaaagagga

SEQ ID NO: 3789 - DNA, 24 bp, Artificial Sequence
  Description of Artificial Sequence:  Hypothetical Probe Sequence
gtgcgtgctacatgcgaggacgtt

SEQ ID NO: 3790 - DNA, 24 bp, Artificial Sequence
  Description of Artificial Sequence:  Hypothetical Probe Sequence
gtgcgtgcctgtacctgaccacct

SEQ ID NO: 3791 - DNA, 24 bp, Artificial Sequence
  Description of Artificial Sequence:  Hypothetical Probe Sequence
gtgcgtgcgtctccatgcaactca

SEQ ID NO: 3792 - DNA, 24 bp, Artificial Sequence
  Description of Artificial Sequence:  Hypothetical Probe Sequence
gtgcgtgcgagtctgtgtgcctca

SEQ ID NO: 3793 - DNA, 24 bp, Artificial Sequence
  Description of Artificial Sequence:  Hypothetical Probe Sequence
gtgcgtgcatcgccatagcctgtc

SEQ ID NO: 3794 - DNA, 24 bp, Artificial Sequence
  Description of Artificial Sequence:  Hypothetical Probe Sequence
gtgcgtgccacggcttcacgtctg

SEQ ID NO: 3795 - DNA, 24 bp, Artificial Sequence
  Description of Artificial Sequence:  Hypothetical Probe Sequence
gtgcggacatacgcaaagccgacc

SEQ ID NO: 3796 - DNA, 24 bp, Artificial Sequence
  Description of Artificial Sequence:  Hypothetical Probe Sequence
gtgcggacgtctcgttggtaagcc

SEQ ID NO: 3797 - DNA, 24 bp, Artificial Sequence
  Description of Artificial Sequence:  Hypothetical Probe Sequence
gtgcggactccccagcgtctacct

SEQ ID NO: 3798 - DNA, 24 bp, Artificial Sequence
  Description of Artificial Sequence:  Hypothetical Probe Sequence
gtgcggactgcgagtgtgtcgcaa

SEQ ID NO: 3799 - DNA, 24 bp, Artificial Sequence
  Description of Artificial Sequence:  Hypothetical Probe Sequence
gtgcggacgacctcgtttgaccat

SEQ ID NO: 3800 - DNA, 24 bp, Artificial Sequence
  Description of Artificial Sequence:  Hypothetical Probe Sequence
gtgcacggaatcgctttgcgggac

SEQ ID NO: 3801 - DNA, 24 bp, Artificial Sequence
  Description of Artificial Sequence:  Hypothetical Probe Sequence
gtgcacggtctgtccccacgccat

SEQ ID NO: 3802 - DNA, 24 bp, Artificial Sequence
  Description of Artificial Sequence:  Hypothetical Probe Sequence
gtgcacggctcaaccttctgcagc

SEQ ID NO: 3803 - DNA, 24 bp, Artificial Sequence
  Description of Artificial Sequence:  Hypothetical Probe Sequence
gtgcacggccatcttgacctgctt

SEQ ID NO: 3804 - DNA, 24 bp, Artificial Sequence
  Description of Artificial Sequence:  Hypothetical Probe Sequence
gtgcacgggtcttgcgatcgtctg

SEQ ID NO: 3805 - DNA, 24 bp, Artificial Sequence
  Description of Artificial Sequence:  Hypothetical Probe Sequence
gtgcacgggagtccatcgaaatcg

SEQ ID NO: 3806 - DNA, 24 bp, Artificial Sequence
  Description of Artificial Sequence:  Hypothetical Probe Sequence
gtgcacggagtggaccagccggac

SEQ ID NO: 3807 - DNA, 24 bp, Artificial Sequence
  Description of Artificial Sequence:  Hypothetical Probe Sequence
gtgcacggatcggatgagccccta

SEQ ID NO: 3808 - DNA, 24 bp, Artificial Sequence
  Description of Artificial Sequence:  Hypothetical Probe Sequence
gtgcacggaggatccctgtctcgt

SEQ ID NO: 3809 - DNA, 24 bp, Artificial Sequence
  Description of Artificial Sequence:  Hypothetical Probe Sequence
gtgcacgggtgcgagtgtgcgatg

SEQ ID NO: 3810 - DNA, 24 bp, Artificial Sequence
  Description of Artificial Sequence:  Hypothetical Probe Sequence
gtgcacggggacccattctgtgat

SEQ ID NO: 3811 - DNA, 24 bp, Artificial Sequence
  Description of Artificial Sequence:  Hypothetical Probe Sequence
gtgcacggacggagtggtgcaaag

SEQ ID NO: 3812 - DNA, 24 bp, Artificial Sequence
  Description of Artificial Sequence:  Hypothetical Probe Sequence
gtgcagccaaagcagccgtttgtc

SEQ ID NO: 3813 - DNA, 24 bp, Artificial Sequence
  Description of Artificial Sequence:  Hypothetical Probe Sequence
gtgcagcctcgttacaacgggatg

SEQ ID NO: 3814 - DNA, 24 bp, Artificial Sequence
  Description of Artificial Sequence:  Hypothetical Probe Sequence
gtgcagccatcgaatcgcaatgat

SEQ ID NO: 3815 - DNA, 24 bp, Artificial Sequence
  Description of Artificial Sequence:  Hypothetical Probe Sequence
gtgcagcctcccgaccacctcgtt

SEQ ID NO: 3816 - DNA, 24 bp, Artificial Sequence
  Description of Artificial Sequence:  Hypothetical Probe Sequence
gtgcagcctgcgccatcttgagga

SEQ ID NO: 3817 - DNA, 24 bp, Artificial Sequence
  Description of Artificial Sequence:  Hypothetical Probe Sequence
gtgcagccgaccccatgtgcagtg

SEQ ID NO: 3818 - DNA, 24 bp, Artificial Sequence
  Description of Artificial Sequence:  Hypothetical Probe Sequence
gtgcagccgtgcagtgcgaatctg

SEQ ID NO: 3819 - DNA, 24 bp, Artificial Sequence
  Description of Artificial Sequence:  Hypothetical Probe Sequence
gtgcagccacgggatgctgtgtgc

SEQ ID NO: 3820 - DNA, 24 bp, Artificial Sequence
  Description of Artificial Sequence:  Hypothetical Probe Sequence
ggacttgaagccaatcccattgcg

SEQ ID NO: 3821 - DNA, 24 bp, Artificial Sequence
  Description of Artificial Sequence:  Hypothetical Probe Sequence
ggacttagcagccacgcacgtgcg

SEQ ID NO: 3822 - DNA, 24 bp, Artificial Sequence
  Description of Artificial Sequence:  Hypothetical Probe Sequence
ggacaatccttgacggccatcagc

SEQ ID NO: 3823 - DNA, 24 bp, Artificial Sequence
  Description of Artificial Sequence:  Hypothetical Probe Sequence
ggacaatctgcgtacaagcccgtt

SEQ ID NO: 3824 - DNA, 24 bp, Artificial Sequence
  Description of Artificial Sequence:  Hypothetical Probe Sequence
ggacaaaggatgacgggcaatgcg

SEQ ID NO: 3825 - DNA, 24 bp, Artificial Sequence
  Description of Artificial Sequence:  Hypothetical Probe Sequence
ggacaaagcacgagccttgacgaa

SEQ ID NO: 3826 - DNA, 24 bp, Artificial Sequence
  Description of Artificial Sequence:  Hypothetical Probe Sequence
ggactctgcgtttcgttcgtgtgc

SEQ ID NO: 3827 - DNA, 24 bp, Artificial Sequence
  Description of Artificial Sequence:  Hypothetical Probe Sequence
ggactctgcctaacgggctttgcg

SEQ ID NO: 3828 - DNA, 24 bp, Artificial Sequence
  Description of Artificial Sequence:  Hypothetical Probe Sequence
ggactctgcacggcaaacctgctt

SEQ ID NO: 3829 - DNA, 24 bp, Artificial Sequence
  Description of Artificial Sequence:  Hypothetical Probe Sequence
ggactcgtcgttatcgcagcagga

SEQ ID NO: 3830 - DNA, 24 bp, Artificial Sequence
  Description of Artificial Sequence:  Hypothetical Probe Sequence
ggactcgtccatgatgggactgcg

SEQ ID NO: 3831 - DNA, 24 bp, Artificial Sequence
  Description of Artificial Sequence:  Hypothetical Probe Sequence
ggactcgtacggcttggtcttgcg

SEQ ID NO: 3832 - DNA, 24 bp, Artificial Sequence
  Description of Artificial Sequence:  Hypothetical Probe Sequence
ggaccttgcttgtgcgttagcacg

SEQ ID NO: 3833 - DNA, 24 bp, Artificial Sequence
  Description of Artificial Sequence:  Hypothetical Probe Sequence
ggaccttgcgttacggcctattga

SEQ ID NO: 3834 - DNA, 24 bp, Artificial Sequence
  Description of Artificial Sequence:  Hypothetical Probe Sequence
ggaccttgctcaaaagcagcagcc

SEQ ID NO: 3835 - DNA, 24 bp, Artificial Sequence
  Description of Artificial Sequence:  Hypothetical Probe Sequence
ggaccttggagtcacgagccatcg

SEQ ID NO: 3836 - DNA, 24 bp, Artificial Sequence
  Description of Artificial Sequence:  Hypothetical Probe Sequence
ggaccttggcaaggacgcaagagt

SEQ ID NO: 3837 - DNA, 24 bp, Artificial Sequence
  Description of Artificial Sequence:  Hypothetical Probe Sequence
ggaccttgcagcgcttgcaaagtg

SEQ ID NO: 3838 - DNA, 24 bp, Artificial Sequence
  Description of Artificial Sequence:  Hypothetical Probe Sequence
ggaccttggtgccgaatcgtggac

SEQ ID NO: 3839 - DNA, 24 bp, Artificial Sequence
  Description of Artificial Sequence:  Hypothetical Probe Sequence
ggaccttgggacgcaacgaagacc

SEQ ID NO: 3840 - DNA, 24 bp, Artificial Sequence
  Description of Artificial Sequence:  Hypothetical Probe Sequence
ggaccgttcgttatacacgggcaa

SEQ ID NO: 3841 - DNA, 24 bp, Artificial Sequence
  Description of Artificial Sequence:  Hypothetical Probe Sequence
ggaccgttacctgagttgcgggac

SEQ ID NO: 3842 - DNA, 24 bp, Artificial Sequence
  Description of Artificial Sequence:  Hypothetical Probe Sequence
ggaccgtttgcggagtatcgttga

SEQ ID NO: 3843 - DNA, 24 bp, Artificial Sequence
  Description of Artificial Sequence:  Hypothetical Probe Sequence
ggacctgtttgatgcggagtagcc

SEQ ID NO: 3844 - DNA, 24 bp, Artificial Sequence
  Description of Artificial Sequence:  Hypothetical Probe Sequence
ggacctgtccatccattcccagga

SEQ ID NO: 3845 - DNA, 24 bp, Artificial Sequence
  Description of Artificial Sequence:  Hypothetical Probe Sequence
ggacccattgatcagcgaccccat

SEQ ID NO: 3846 - DNA, 24 bp, Artificial Sequence
  Description of Artificial Sequence:  Hypothetical Probe Sequence
ggacccataaagctgttcccgtgc

SEQ ID NO: 3847 - DNA, 24 bp, Artificial Sequence
  Description of Artificial Sequence:  Hypothetical Probe Sequence
ggacccatcttgcttgtcccatcg

SEQ ID NO: 3848 - DNA, 24 bp, Artificial Sequence
  Description of Artificial Sequence:  Hypothetical Probe Sequence
ggacccatggtatgcggtgcatac

SEQ ID NO: 3849 - DNA, 24 bp, Artificial Sequence
  Description of Artificial Sequence:  Hypothetical Probe Sequence
ggacccatcacgcttgcgaacttg

SEQ ID NO: 3850 - DNA, 24 bp, Artificial Sequence
  Description of Artificial Sequence:  Hypothetical Probe Sequence
ggacccatgtgcatacgcaaggac

SEQ ID NO: 3851 - DNA, 24 bp, Artificial Sequence
  Description of Artificial Sequence:  Hypothetical Probe Sequence
ggaccgaattgacttgcacgcacg

SEQ ID NO: 3852 - DNA, 24 bp, Artificial Sequence
  Description of Artificial Sequence:  Hypothetical Probe Sequence
ggaccgaaatacacgggtgcccta

SEQ ID NO: 3853 - DNA, 24 bp, Artificial Sequence
  Description of Artificial Sequence:  Hypothetical Probe Sequence
ggaccgaaaaagtctgcttggcaa

SEQ ID NO: 3854 - DNA, 24 bp, Artificial Sequence
  Description of Artificial Sequence:  Hypothetical Probe Sequence
ggaccgaacttgacggtccctcgt

SEQ ID NO: 3855 - DNA, 24 bp, Artificial Sequence
  Description of Artificial Sequence:  Hypothetical Probe Sequence
ggaccgaagctttcgtaggacacg

SEQ ID NO: 3856 - DNA, 24 bp, Artificial Sequence
  Description of Artificial Sequence:  Hypothetical Probe Sequence
ggaccgaaacctgcttgcttgacc

SEQ ID NO: 3857 - DNA, 24 bp, Artificial Sequence
  Description of Artificial Sequence:  Hypothetical Probe Sequence
ggaccgaaaggaataccagccacg

SEQ ID NO: 3858 - DNA, 24 bp, Artificial Sequence
  Description of Artificial Sequence:  Hypothetical Probe Sequence
ggaccgaagacccagcgcaattag

SEQ ID NO: 3859 - DNA, 24 bp, Artificial Sequence
  Description of Artificial Sequence:  Hypothetical Probe Sequence
ggacgcttttagggaccgaacgaa

SEQ ID NO: 3860 - DNA, 24 bp, Artificial Sequence
  Description of Artificial Sequence:  Hypothetical Probe Sequence
ggacgcttaaaggtgcgtgctccc

SEQ ID NO: 3861 - DNA, 24 bp, Artificial Sequence
  Description of Artificial Sequence:  Hypothetical Probe Sequence
ggacgctttgtcaccttccctgcg

SEQ ID NO: 3862 - DNA, 24 bp, Artificial Sequence
  Description of Artificial Sequence:  Hypothetical Probe Sequence
ggacgcttggtaaatcgctttcgt

SEQ ID NO: 3863 - DNA, 24 bp, Artificial Sequence
  Description of Artificial Sequence:  Hypothetical Probe Sequence
ggacgcttacctgcaacgaaccat

SEQ ID NO: 3864 - DNA, 24 bp, Artificial Sequence
  Description of Artificial Sequence:  Hypothetical Probe Sequence
ggacgcttcctatgtcatcggcaa

SEQ ID NO: 3865 - DNA, 24 bp, Artificial Sequence
  Description of Artificial Sequence:  Hypothetical Probe Sequence
ggacgctttgcgttgaatcggacc

SEQ ID NO: 3866 - DNA, 24 bp, Artificial Sequence
  Description of Artificial Sequence:  Hypothetical Probe Sequence
ggacggtacgtttcgttgcggctt

SEQ ID NO: 3867 - DNA, 24 bp, Artificial Sequence
  Description of Artificial Sequence:  Hypothetical Probe Sequence
ggacggtaccattgtcgcaaggac

SEQ ID NO: 3868 - DNA, 24 bp, Artificial Sequence
  Description of Artificial Sequence:  Hypothetical Probe Sequence
ggacggtagtgcagtgcagcgacc

SEQ ID NO: 3869 - DNA, 24 bp, Artificial Sequence
  Description of Artificial Sequence:  Hypothetical Probe Sequence
ggacggtaggacgcaatcccacct

SEQ ID NO: 3870 - DNA, 24 bp, Artificial Sequence
  Description of Artificial Sequence:  Hypothetical Probe Sequence
ggacggtaagccgtgcacctgtgc

SEQ ID NO: 3871 - DNA, 24 bp, Artificial Sequence
  Description of Artificial Sequence:  Hypothetical Probe Sequence
ggacgtctttgatccccacgcgaa

SEQ ID NO: 3872 - DNA, 24 bp, Artificial Sequence
  Description of Artificial Sequence:  Hypothetical Probe Sequence
ggacgtcttcgtgcaagcaaagga

SEQ ID NO: 3873 - DNA, 24 bp, Artificial Sequence
  Description of Artificial Sequence:  Hypothetical Probe Sequence
ggacgtctccatggaccagcgacc

SEQ ID NO: 3874 - DNA, 24 bp, Artificial Sequence
  Description of Artificial Sequence:  Hypothetical Probe Sequence
ggacgtctgcaagacctctgtgcg

SEQ ID NO: 3875 - DNA, 24 bp, Artificial Sequence
  Description of Artificial Sequence:  Hypothetical Probe Sequence
ggacgtctcacgcacgaaagcagc

SEQ ID NO: 3876 - DNA, 24 bp, Artificial Sequence
  Description of Artificial Sequence:  Hypothetical Probe Sequence
ggacgagtatcgggaccctatgcg

SEQ ID NO: 3877 - DNA, 24 bp, Artificial Sequence
  Description of Artificial Sequence:  Hypothetical Probe Sequence
ggacgagtcagcgtgcgtgcagga

SEQ ID NO: 3878 - DNA, 24 bp, Artificial Sequence
  Description of Artificial Sequence:  Hypothetical Probe Sequence
ggacgagtacggttgaatcggctt

SEQ ID NO: 3879 - DNA, 24 bp, Artificial Sequence
  Description of Artificial Sequence:  Hypothetical Probe Sequence
ggacgcaattgaacggagtgcagc

SEQ ID NO: 3880 - DNA, 24 bp, Artificial Sequence
  Description of Artificial Sequence:  Hypothetical Probe Sequence
ggacgcaaatacgtgcccatggac

SEQ ID NO: 3881 - DNA, 24 bp, Artificial Sequence
  Description of Artificial Sequence:  Hypothetical Probe Sequence
ggacgcaatgtcccatggtaggac

SEQ ID NO: 3882 - DNA, 24 bp, Artificial Sequence
  Description of Artificial Sequence:  Hypothetical Probe Sequence
ggacgcaatcgttctggtgcaaag

SEQ ID NO: 3883 - DNA, 24 bp, Artificial Sequence
  Description of Artificial Sequence:  Hypothetical Probe Sequence
ggacgcaacctaatactgcgtgcg

SEQ ID NO: 3884 - DNA, 24 bp, Artificial Sequence
  Description of Artificial Sequence:  Hypothetical Probe Sequence
ggacgcaatgcgttgaaggatcgt

SEQ ID NO: 3885 - DNA, 24 bp, Artificial Sequence
  Description of Artificial Sequence:  Hypothetical Probe Sequence
ggacgcaagtgcagtggtcttccc

SEQ ID NO: 3886 - DNA, 24 bp, Artificial Sequence
  Description of Artificial Sequence:  Hypothetical Probe Sequence
ggacgcaaggactcccggtaaaag

SEQ ID NO: 3887 - DNA, 24 bp, Artificial Sequence
  Description of Artificial Sequence:  Hypothetical Probe Sequence
ggacgcaaacggtgatcagccttg

SEQ ID NO: 3888 - DNA, 24 bp, Artificial Sequence
  Description of Artificial Sequence:  Hypothetical Probe Sequence
ggacagtgtgcgacggacctgtgc

SEQ ID NO: 3889 - DNA, 24 bp, Artificial Sequence
  Description of Artificial Sequence:  Hypothetical Probe Sequence
ggacacctcacgggactgattgcg

SEQ ID NO: 3890 - DNA, 24 bp, Artificial Sequence
  Description of Artificial Sequence:  Hypothetical Probe Sequence
ggacacctgaccgtgcacggccta

SEQ ID NO: 3891 - DNA, 24 bp, Artificial Sequence
  Description of Artificial Sequence:  Hypothetical Probe Sequence
ggacacctagccttagcgtttgcg

SEQ ID NO: 3892 - DNA, 24 bp, Artificial Sequence
  Description of Artificial Sequence:  Hypothetical Probe Sequence
ggacatcgaaagacgggtgccacg

SEQ ID NO: 3893 - DNA, 24 bp, Artificial Sequence
  Description of Artificial Sequence:  Hypothetical Probe Sequence
ggacatcggcttcttgcttgacgg

SEQ ID NO: 3894 - DNA, 24 bp, Artificial Sequence
  Description of Artificial Sequence:  Hypothetical Probe Sequence
ggacatcgcacggtctagccatcg

SEQ ID NO: 3895 - DNA, 24 bp, Artificial Sequence
  Description of Artificial Sequence:  Hypothetical Probe Sequence
ggacatcgacggggacctgtcgtt

SEQ ID NO: 3896 - DNA, 24 bp, Artificial Sequence
  Description of Artificial Sequence:  Hypothetical Probe Sequence
ggacaggacgaaatcgtcccggac

SEQ ID NO: 3897 - DNA, 24 bp, Artificial Sequence
  Description of Artificial Sequence:  Hypothetical Probe Sequence
ggacaggaatcgacggcctaccat

SEQ ID NO: 3898 - DNA, 24 bp, Artificial Sequence
  Description of Artificial Sequence:  Hypothetical Probe Sequence
ggacaggaaggattgaggacgtgc

SEQ ID NO: 3899 - DNA, 24 bp, Artificial Sequence
  Description of Artificial Sequence:  Hypothetical Probe Sequence
ggaccctacgaaaggatcgttgcg

SEQ ID NO: 3900 - DNA, 24 bp, Artificial Sequence
  Description of Artificial Sequence:  Hypothetical Probe Sequence
ggaccctagcttgcaagtgcgtct

SEQ ID NO: 3901 - DNA, 24 bp, Artificial Sequence
  Description of Artificial Sequence:  Hypothetical Probe Sequence
ggaccctagcaacagcgatgcgaa

SEQ ID NO: 3902 - DNA, 24 bp, Artificial Sequence
  Description of Artificial Sequence:  Hypothetical Probe Sequence
ggaccctacctagaccagccacgg

SEQ ID NO: 3903 - DNA, 24 bp, Artificial Sequence
  Description of Artificial Sequence:  Hypothetical Probe Sequence
ggacgatgctcactgttgcggacc

SEQ ID NO: 3904 - DNA, 24 bp, Artificial Sequence
  Description of Artificial Sequence:  Hypothetical Probe Sequence
ggacgatgggtaacggggtaccat

SEQ ID NO: 3905 - DNA, 24 bp, Artificial Sequence
  Description of Artificial Sequence:  Hypothetical Probe Sequence
ggacgatggtctagcccgaaagtg

SEQ ID NO: 3906 - DNA, 24 bp, Artificial Sequence
  Description of Artificial Sequence:  Hypothetical Probe Sequence
ggacgatgatcgcgaaagccgtct

SEQ ID NO: 3907 - DNA, 24 bp, Artificial Sequence
  Description of Artificial Sequence:  Hypothetical Probe Sequence
ggactccctgtccgttgcttgcaa

SEQ ID NO: 3908 - DNA, 24 bp, Artificial Sequence
  Description of Artificial Sequence:  Hypothetical Probe Sequence
ggactcccctgttacagacctgcg

SEQ ID NO: 3909 - DNA, 24 bp, Artificial Sequence
  Description of Artificial Sequence:  Hypothetical Probe Sequence
ggactcccccatttagcacggatg

SEQ ID NO: 3910 - DNA, 24 bp, Artificial Sequence
  Description of Artificial Sequence:  Hypothetical Probe Sequence
ggactcccacctagcccagctgtc

SEQ ID NO: 3911 - DNA, 24 bp, Artificial Sequence
  Description of Artificial Sequence:  Hypothetical Probe Sequence
ggactcccatcgcgaaaggaggac

SEQ ID NO: 3912 - DNA, 24 bp, Artificial Sequence
  Description of Artificial Sequence:  Hypothetical Probe Sequence
ggactccccacgcttgcgttagga

SEQ ID NO: 3913 - DNA, 24 bp, Artificial Sequence
  Description of Artificial Sequence:  Hypothetical Probe Sequence
ggactcccggacgcttcacgtgat

SEQ ID NO: 3914 - DNA, 24 bp, Artificial Sequence
  Description of Artificial Sequence:  Hypothetical Probe Sequence
ggactgcgttagccatcacgacgg

SEQ ID NO: 3915 - DNA, 24 bp, Artificial Sequence
  Description of Artificial Sequence:  Hypothetical Probe Sequence
ggactgcgtcgtcgttcagcagtg

SEQ ID NO: 3916 - DNA, 24 bp, Artificial Sequence
  Description of Artificial Sequence:  Hypothetical Probe Sequence
ggactgcgcttgacctcacgacct

SEQ ID NO: 3917 - DNA, 24 bp, Artificial Sequence
  Description of Artificial Sequence:  Hypothetical Probe Sequence
ggactgcgctcatcgtcgttttga

SEQ ID NO: 3918 - DNA, 24 bp, Artificial Sequence
  Description of Artificial Sequence:  Hypothetical Probe Sequence
ggactgcggcttaggagcttcacg

SEQ ID NO: 3919 - DNA, 24 bp, Artificial Sequence
  Description of Artificial Sequence:  Hypothetical Probe Sequence
ggactgcgacctttgagcaacgaa

SEQ ID NO: 3920 - DNA, 24 bp, Artificial Sequence
  Description of Artificial Sequence:  Hypothetical Probe Sequence
ggactgcgatcgacctccatggac

SEQ ID NO: 3921 - DNA, 24 bp, Artificial Sequence
  Description of Artificial Sequence:  Hypothetical Probe Sequence
ggactgcggatggagtatcgccat

SEQ ID NO: 3922 - DNA, 24 bp, Artificial Sequence
  Description of Artificial Sequence:  Hypothetical Probe Sequence
ggactgcgcacgataccagcagga

SEQ ID NO: 3923 - DNA, 24 bp, Artificial Sequence
  Description of Artificial Sequence:  Hypothetical Probe Sequence
ggactgcgggacccatccatggta

SEQ ID NO: 3924 - DNA, 24 bp, Artificial Sequence
  Description of Artificial Sequence:  Hypothetical Probe Sequence
ggaccacgtgatgacctccccgaa

SEQ ID NO: 3925 - DNA, 24 bp, Artificial Sequence
  Description of Artificial Sequence:  Hypothetical Probe Sequence
ggaccacgctcattgatcccctgt

SEQ ID NO: 3926 - DNA, 24 bp, Artificial Sequence
  Description of Artificial Sequence:  Hypothetical Probe Sequence
ggaccacggctttctgcacgagtg

SEQ ID NO: 3927 - DNA, 24 bp, Artificial Sequence
  Description of Artificial Sequence:  Hypothetical Probe Sequence
ggaccacggagtatcgctcacacg

SEQ ID NO: 3928 - DNA, 24 bp, Artificial Sequence
  Description of Artificial Sequence:  Hypothetical Probe Sequence
ggaccacgcacgctcagtgcccta

SEQ ID NO: 3929 - DNA, 24 bp, Artificial Sequence
  Description of Artificial Sequence:  Hypothetical Probe Sequence
ggaccacgacggtctgtgcgtgtc

SEQ ID NO: 3930 - DNA, 24 bp, Artificial Sequence
  Description of Artificial Sequence:  Hypothetical Probe Sequence
ggaccacgagcccgaacgtttgtc

SEQ ID NO: 3931 - DNA, 24 bp, Artificial Sequence
  Description of Artificial Sequence:  Hypothetical Probe Sequence
ggaccagcttgatcgtcgaaacgg

SEQ ID NO: 3932 - DNA, 24 bp, Artificial Sequence
  Description of Artificial Sequence:  Hypothetical Probe Sequence
ggaccagctgtccagcaggacgaa

SEQ ID NO: 3933 - DNA, 24 bp, Artificial Sequence
  Description of Artificial Sequence:  Hypothetical Probe Sequence
ggaccagccttgtgcgacggatac

SEQ ID NO: 3934 - DNA, 24 bp, Artificial Sequence
  Description of Artificial Sequence:  Hypothetical Probe Sequence
ggaccagcctgtggactgtccacg

SEQ ID NO: 3935 - DNA, 24 bp, Artificial Sequence
  Description of Artificial Sequence:  Hypothetical Probe Sequence
ggaccagcggtatgatgaccagcc

SEQ ID NO: 3936 - DNA, 24 bp, Artificial Sequence
  Description of Artificial Sequence:  Hypothetical Probe Sequence
ggaccagcagtgacctgtgcgctt

SEQ ID NO: 3937 - DNA, 24 bp, Artificial Sequence
  Description of Artificial Sequence:  Hypothetical Probe Sequence
ggaccagctgcggaccctcaggac

SEQ ID NO: 3938 - DNA, 24 bp, Artificial Sequence
  Description of Artificial Sequence:  Hypothetical Probe Sequence
ggacgaccttgagtgcgcaagcaa

SEQ ID NO: 3939 - DNA, 24 bp, Artificial Sequence
  Description of Artificial Sequence:  Hypothetical Probe Sequence
ggacgaccctgtagtgcgttcgaa

SEQ ID NO: 3940 - DNA, 24 bp, Artificial Sequence
  Description of Artificial Sequence:  Hypothetical Probe Sequence
ggacgaccggtagtgcagccaatc

SEQ ID NO: 3941 - DNA, 24 bp, Artificial Sequence
  Description of Artificial Sequence:  Hypothetical Probe Sequence
ggacgaccgtctgtgcacctcgaa

SEQ ID NO: 3942 - DNA, 24 bp, Artificial Sequence
  Description of Artificial Sequence:  Hypothetical Probe Sequence
ggacgaccgagtcttgggacgagt

SEQ ID NO: 3943 - DNA, 24 bp, Artificial Sequence
  Description of Artificial Sequence:  Hypothetical Probe Sequence
ggacgaccagtgaaaggtgcagcc

SEQ ID NO: 3944 - DNA, 24 bp, Artificial Sequence
  Description of Artificial Sequence:  Hypothetical Probe Sequence
ggacgaccgaccccatctcatccc

SEQ ID NO: 3945 - DNA, 24 bp, Artificial Sequence
  Description of Artificial Sequence:  Hypothetical Probe Sequence
ggacgtgctgattgattcccagga

SEQ ID NO: 3946 - DNA, 24 bp, Artificial Sequence
  Description of Artificial Sequence:  Hypothetical Probe Sequence
ggacgtgcaatcggaccgtttcgt

SEQ ID NO: 3947 - DNA, 24 bp, Artificial Sequence
  Description of Artificial Sequence:  Hypothetical Probe Sequence
ggacgtgctctgtcgtccatacgg

SEQ ID NO: 3948 - DNA, 24 bp, Artificial Sequence
  Description of Artificial Sequence:  Hypothetical Probe Sequence
ggacgtgctgtccagcacggagtg

SEQ ID NO: 3949 - DNA, 24 bp, Artificial Sequence
  Description of Artificial Sequence:  Hypothetical Probe Sequence
ggacgtgctcgtcgaagcaaacct

SEQ ID NO: 3950 - DNA, 24 bp, Artificial Sequence
  Description of Artificial Sequence:  Hypothetical Probe Sequence
ggacgtgccgttgcttcgaatgtc

SEQ ID NO: 3951 - DNA, 24 bp, Artificial Sequence
  Description of Artificial Sequence:  Hypothetical Probe Sequence
ggacgtgccgaaatactcccgtgc

SEQ ID NO: 3952 - DNA, 24 bp, Artificial Sequence
  Description of Artificial Sequence:  Hypothetical Probe Sequence
ggacgtgcggtatgtcggacagga

SEQ ID NO: 3953 - DNA, 24 bp, Artificial Sequence
  Description of Artificial Sequence:  Hypothetical Probe Sequence
ggacgtgcagtggtgctgcgacct

SEQ ID NO: 3954 - DNA, 24 bp, Artificial Sequence
  Description of Artificial Sequence:  Hypothetical Probe Sequence
ggacgtgccctacctatcgttccc

SEQ ID NO: 3955 - DNA, 24 bp, Artificial Sequence
  Description of Artificial Sequence:  Hypothetical Probe Sequence
ggacgtgctgcgtgtccttgcttg

SEQ ID NO: 3956 - DNA, 24 bp, Artificial Sequence
  Description of Artificial Sequence:  Hypothetical Probe Sequence
ggacgtgccacgggacagtgcttg

SEQ ID NO: 3957 - DNA, 24 bp, Artificial Sequence
  Description of Artificial Sequence:  Hypothetical Probe Sequence
ggacgtgcacggtgattgtcgacc

SEQ ID NO: 3958 - DNA, 24 bp, Artificial Sequence
  Description of Artificial Sequence:  Hypothetical Probe Sequence
ggacggactcgtctgtcacgggac

SEQ ID NO: 3959 - DNA, 24 bp, Artificial Sequence
  Description of Artificial Sequence:  Hypothetical Probe Sequence
ggacggaccgttttaggaccgacc

SEQ ID NO: 3960 - DNA, 24 bp, Artificial Sequence
  Description of Artificial Sequence:  Hypothetical Probe Sequence
ggacggacctgttacatccccacg

SEQ ID NO: 3961 - DNA, 24 bp, Artificial Sequence
  Description of Artificial Sequence:  Hypothetical Probe Sequence
ggacggaccgaagatgcagcctgt

SEQ ID NO: 3962 - DNA, 24 bp, Artificial Sequence
  Description of Artificial Sequence:  Hypothetical Probe Sequence
ggacggacgagttacatgcgacgg

SEQ ID NO: 3963 - DNA, 24 bp, Artificial Sequence
  Description of Artificial Sequence:  Hypothetical Probe Sequence
ggacggacacctgcaacttggcaa

SEQ ID NO: 3964 - DNA, 24 bp, Artificial Sequence
  Description of Artificial Sequence:  Hypothetical Probe Sequence
ggacggacgatgttagacggagcc

SEQ ID NO: 3965 - DNA, 24 bp, Artificial Sequence
  Description of Artificial Sequence:  Hypothetical Probe Sequence
ggacggactcccagtgacggtcgt

SEQ ID NO: 3966 - DNA, 24 bp, Artificial Sequence
  Description of Artificial Sequence:  Hypothetical Probe Sequence
ggacggactgcgaggatctgccat

SEQ ID NO: 3967 - DNA, 24 bp, Artificial Sequence
  Description of Artificial Sequence:  Hypothetical Probe Sequence
ggacggaccagcccatgcttaaag

SEQ ID NO: 3968 - DNA, 24 bp, Artificial Sequence
  Description of Artificial Sequence:  Hypothetical Probe Sequence
ggacacggttaggacctgcgagcc

SEQ ID NO: 3969 - DNA, 24 bp, Artificial Sequence
  Description of Artificial Sequence:  Hypothetical Probe Sequence
ggacacggtctgagcctcgtgtgc

SEQ ID NO: 3970 - DNA, 24 bp, Artificial Sequence
  Description of Artificial Sequence:  Hypothetical Probe Sequence
ggacacggcgttaatctgcgagtg

SEQ ID NO: 3971 - DNA, 24 bp, Artificial Sequence
  Description of Artificial Sequence:  Hypothetical Probe Sequence
ggacacggctgttacagctttccc

SEQ ID NO: 3972 - DNA, 24 bp, Artificial Sequence
  Description of Artificial Sequence:  Hypothetical Probe Sequence
ggacacgggagtcgaaggacatcg

SEQ ID NO: 3973 - DNA, 24 bp, Artificial Sequence
  Description of Artificial Sequence:  Hypothetical Probe Sequence
ggacacggagtgcgttcctaagcc

SEQ ID NO: 3974 - DNA, 24 bp, Artificial Sequence
  Description of Artificial Sequence:  Hypothetical Probe Sequence
ggacagcccgttcttgaatccagc

SEQ ID NO: 3975 - DNA, 24 bp, Artificial Sequence
  Description of Artificial Sequence:  Hypothetical Probe Sequence
ggacagccctgtaaagagccgacc

SEQ ID NO: 3976 - DNA, 24 bp, Artificial Sequence
  Description of Artificial Sequence:  Hypothetical Probe Sequence
ggacagcctgcggcaactcagtgc

SEQ ID NO: 3977 - DNA, 24 bp, Artificial Sequence
  Description of Artificial Sequence:  Hypothetical Probe Sequence
ggacagcccacgcacgtgatgcaa

SEQ ID NO: 3978 - DNA, 24 bp, Artificial Sequence
  Description of Artificial Sequence:  Hypothetical Probe Sequence
ggacagccgacccgttctgtcacg

SEQ ID NO: 3979 - DNA, 24 bp, Artificial Sequence
  Description of Artificial Sequence:  Hypothetical Probe Sequence
ggacagccggaccctactcaacgg

SEQ ID NO: 3980 - DNA, 24 bp, Artificial Sequence
  Description of Artificial Sequence:  Hypothetical Probe Sequence
acggttgaccattgattgcggctt

SEQ ID NO: 3981 - DNA, 24 bp, Artificial Sequence
  Description of Artificial Sequence:  Hypothetical Probe Sequence
acggttgacagccacgatcgctca

SEQ ID NO: 3982 - DNA, 24 bp, Artificial Sequence
  Description of Artificial Sequence:  Hypothetical Probe Sequence
acggttgagaccggacgatgacgg

SEQ ID NO: 3983 - DNA, 24 bp, Artificial Sequence
  Description of Artificial Sequence:  Hypothetical Probe Sequence
acggttgagtgctgcgttgatccc

SEQ ID NO: 3984 - DNA, 24 bp, Artificial Sequence
  Description of Artificial Sequence:  Hypothetical Probe Sequence
acggtgatcgaagcaaatcgcagc

SEQ ID NO: 3985 - DNA, 24 bp, Artificial Sequence
  Description of Artificial Sequence:  Hypothetical Probe Sequence
acggtgatgcaaaccttccctcgt

SEQ ID NO: 3986 - DNA, 24 bp, Artificial Sequence
  Description of Artificial Sequence:  Hypothetical Probe Sequence
acggtgatggactccctgcggtct

SEQ ID NO: 3987 - DNA, 24 bp, Artificial Sequence
  Description of Artificial Sequence:  Hypothetical Probe Sequence
acggttaggcaacacggatggacc

SEQ ID NO: 3988 - DNA, 24 bp, Artificial Sequence
  Description of Artificial Sequence:  Hypothetical Probe Sequence
acggttagtcccaaagggactccc

SEQ ID NO: 3989 - DNA, 24 bp, Artificial Sequence
  Description of Artificial Sequence:  Hypothetical Probe Sequence
acggttagcacgcagcttgaagcc

SEQ ID NO: 3990 - DNA, 24 bp, Artificial Sequence
  Description of Artificial Sequence:  Hypothetical Probe Sequence
acggaatcccattcgtagccgacc

SEQ ID NO: 3991 - DNA, 24 bp, Artificial Sequence
  Description of Artificial Sequence:  Hypothetical Probe Sequence
acggaatccgaaacctggacccta

SEQ ID NO: 3992 - DNA, 24 bp, Artificial Sequence
  Description of Artificial Sequence:  Hypothetical Probe Sequence
acggaatcatcgagcccagcagtg

SEQ ID NO: 3993 - DNA, 24 bp, Artificial Sequence
  Description of Artificial Sequence:  Hypothetical Probe Sequence
acggaatccctacacgagccacgg

SEQ ID NO: 3994 - DNA, 24 bp, Artificial Sequence
  Description of Artificial Sequence:  Hypothetical Probe Sequence
acggaatcgatgtctggacctccc

SEQ ID NO: 3995 - DNA, 24 bp, Artificial Sequence
  Description of Artificial Sequence:  Hypothetical Probe Sequence
acggaatctcccggtagcaacgaa

SEQ ID NO: 3996 - DNA, 24 bp, Artificial Sequence
  Description of Artificial Sequence:  Hypothetical Probe Sequence
acggaatcggactgatacggccat

SEQ ID NO: 3997 - DNA, 24 bp, Artificial Sequence
  Description of Artificial Sequence:  Hypothetical Probe Sequence
acggataccgaacgttcgaacgaa

SEQ ID NO: 3998 - DNA, 24 bp, Artificial Sequence
  Description of Artificial Sequence:  Hypothetical Probe Sequence
acggatacgcttgacccgttatcg

SEQ ID NO: 3999 - DNA, 24 bp, Artificial Sequence
  Description of Artificial Sequence:  Hypothetical Probe Sequence
acggatacggacttgacacgcgaa

SEQ ID NO: 4000 - DNA, 24 bp, Artificial Sequence
  Description of Artificial Sequence:  Hypothetical Probe Sequence
acggaaagctcagcaacagcgtct

SEQ ID NO: 4001 - DNA, 24 bp, Artificial Sequence
  Description of Artificial Sequence:  Hypothetical Probe Sequence
acggaaagctgtatcgcttggacc

SEQ ID NO: 4002 - DNA, 24 bp, Artificial Sequence
  Description of Artificial Sequence:  Hypothetical Probe Sequence
acggaaagcgaattagacggggac

SEQ ID NO: 4003 - DNA, 24 bp, Artificial Sequence
  Description of Artificial Sequence:  Hypothetical Probe Sequence
acggaaaggagtatcgtcccccat

SEQ ID NO: 4004 - DNA, 24 bp, Artificial Sequence
  Description of Artificial Sequence:  Hypothetical Probe Sequence
acggaaagaggacacgtccccagc

SEQ ID NO: 4005 - DNA, 24 bp, Artificial Sequence
  Description of Artificial Sequence:  Hypothetical Probe Sequence
acggaaagcagctcgtgtgctgat

SEQ ID NO: 4006 - DNA, 24 bp, Artificial Sequence
  Description of Artificial Sequence:  Hypothetical Probe Sequence
acggaaaggtgcgaccccatatcg

SEQ ID NO: 4007 - DNA, 24 bp, Artificial Sequence
  Description of Artificial Sequence:  Hypothetical Probe Sequence
acggaaagagccggtagcaaacgg

SEQ ID NO: 4008 - DNA, 24 bp, Artificial Sequence
  Description of Artificial Sequence:  Hypothetical Probe Sequence
acggtacagcttgatggctttgcg

SEQ ID NO: 4009 - DNA, 24 bp, Artificial Sequence
  Description of Artificial Sequence:  Hypothetical Probe Sequence
acggtacatgcgtccctgatacgg

SEQ ID NO: 4010 - DNA, 24 bp, Artificial Sequence
  Description of Artificial Sequence:  Hypothetical Probe Sequence
acggtctgaaagcacgcacgcgaa

SEQ ID NO: 4011 - DNA, 24 bp, Artificial Sequence
  Description of Artificial Sequence:  Hypothetical Probe Sequence
acggtctgcgttgaccagtgtccc

SEQ ID NO: 4012 - DNA, 24 bp, Artificial Sequence
  Description of Artificial Sequence:  Hypothetical Probe Sequence
acggtctgctcacgttcagcagga

SEQ ID NO: 4013 - DNA, 24 bp, Artificial Sequence
  Description of Artificial Sequence:  Hypothetical Probe Sequence
acggtctgctgtcgaaatcggatg

SEQ ID NO: 4014 - DNA, 24 bp, Artificial Sequence
  Description of Artificial Sequence:  Hypothetical Probe Sequence
acggtctgccatgtgccacgtgtc

SEQ ID NO: 4015 - DNA, 24 bp, Artificial Sequence
  Description of Artificial Sequence:  Hypothetical Probe Sequence
acggtctgggtattgaatcgtgcg

SEQ ID NO: 4016 - DNA, 24 bp, Artificial Sequence
  Description of Artificial Sequence:  Hypothetical Probe Sequence
acggtctgaggaacctagccgcaa

SEQ ID NO: 4017 - DNA, 24 bp, Artificial Sequence
  Description of Artificial Sequence:  Hypothetical Probe Sequence
acggtctgggacccatacgggtct

SEQ ID NO: 4018 - DNA, 24 bp, Artificial Sequence
  Description of Artificial Sequence:  Hypothetical Probe Sequence
acggtgtcctcaggacgtgcctgt

SEQ ID NO: 4019 - DNA, 24 bp, Artificial Sequence
  Description of Artificial Sequence:  Hypothetical Probe Sequence
acggtgtcccatatcgaatcgctt

SEQ ID NO: 4020 - DNA, 24 bp, Artificial Sequence
  Description of Artificial Sequence:  Hypothetical Probe Sequence
acggtgtcggtaagtggtcttgcg

SEQ ID NO: 4021 - DNA, 24 bp, Artificial Sequence
  Description of Artificial Sequence:  Hypothetical Probe Sequence
acggtgtccacgacctgaccgatg

SEQ ID NO: 4022 - DNA, 24 bp, Artificial Sequence
  Description of Artificial Sequence:  Hypothetical Probe Sequence
acggtcgttgatttgaacggcacg

SEQ ID NO: 4023 - DNA, 24 bp, Artificial Sequence
  Description of Artificial Sequence:  Hypothetical Probe Sequence
acggtcgtcgttttagacggcagc

SEQ ID NO: 4024 - DNA, 24 bp, Artificial Sequence
  Description of Artificial Sequence:  Hypothetical Probe Sequence
acggtcgtctcattagcagctgcg

SEQ ID NO: 4025 - DNA, 24 bp, Artificial Sequence
  Description of Artificial Sequence:  Hypothetical Probe Sequence
acggtcgtgcttaggacgttcacg

SEQ ID NO: 4026 - DNA, 24 bp, Artificial Sequence
  Description of Artificial Sequence:  Hypothetical Probe Sequence
acggtcgtaccttcgttgcgaaag

SEQ ID NO: 4027 - DNA, 24 bp, Artificial Sequence
  Description of Artificial Sequence:  Hypothetical Probe Sequence
acggtcgtgatgaaagggactgcg

SEQ ID NO: 4028 - DNA, 24 bp, Artificial Sequence
  Description of Artificial Sequence:  Hypothetical Probe Sequence
acggtcgttgcgcttgtcgttcgt

SEQ ID NO: 4029 - DNA, 24 bp, Artificial Sequence
  Description of Artificial Sequence:  Hypothetical Probe Sequence
acggtcgtgtgcccatgatgctca

SEQ ID NO: 4030 - DNA, 24 bp, Artificial Sequence
  Description of Artificial Sequence:  Hypothetical Probe Sequence
acggtcgtacggatactgcggacc

SEQ ID NO: 4031 - DNA, 24 bp, Artificial Sequence
  Description of Artificial Sequence:  Hypothetical Probe Sequence
acggcttgtctgaggagtgcacgg

SEQ ID NO: 4032 - DNA, 24 bp, Artificial Sequence
  Description of Artificial Sequence:  Hypothetical Probe Sequence
acggcttgtcgtgcttaatcagcc

SEQ ID NO: 4033 - DNA, 24 bp, Artificial Sequence
  Description of Artificial Sequence:  Hypothetical Probe Sequence
acggcttgggtactcacacggtgc

SEQ ID NO: 4034 - DNA, 24 bp, Artificial Sequence
  Description of Artificial Sequence:  Hypothetical Probe Sequence
acggcttggagtcgttcagcctca

SEQ ID NO: 4035 - DNA, 24 bp, Artificial Sequence
  Description of Artificial Sequence:  Hypothetical Probe Sequence
acggcttgagtgtccctctggcaa

SEQ ID NO: 4036 - DNA, 24 bp, Artificial Sequence
  Description of Artificial Sequence:  Hypothetical Probe Sequence
acggcttgacctgaccccatccat

SEQ ID NO: 4037 - DNA, 24 bp, Artificial Sequence
  Description of Artificial Sequence:  Hypothetical Probe Sequence
acggcttgaggaggactcccgtct

SEQ ID NO: 4038 - DNA, 24 bp, Artificial Sequence
  Description of Artificial Sequence:  Hypothetical Probe Sequence
acggcttgcagccagctgattcgt

SEQ ID NO: 4039 - DNA, 24 bp, Artificial Sequence
  Description of Artificial Sequence:  Hypothetical Probe Sequence
acggcttggtgcccattgatgtgc

SEQ ID NO: 4040 - DNA, 24 bp, Artificial Sequence
  Description of Artificial Sequence:  Hypothetical Probe Sequence
acggcttgggaccacgacctggta

SEQ ID NO: 4041 - DNA, 24 bp, Artificial Sequence
  Description of Artificial Sequence:  Hypothetical Probe Sequence
acggcttgacggataccgtttcgt

SEQ ID NO: 4042 - DNA, 24 bp, Artificial Sequence
  Description of Artificial Sequence:  Hypothetical Probe Sequence
acggcgtttgatgatgatcggacc

SEQ ID NO: 4043 - DNA, 24 bp, Artificial Sequence
  Description of Artificial Sequence:  Hypothetical Probe Sequence
acggcgtttacagaccctgtggac

SEQ ID NO: 4044 - DNA, 24 bp, Artificial Sequence
  Description of Artificial Sequence:  Hypothetical Probe Sequence
acggcgtttctggtctcagcccat

SEQ ID NO: 4045 - DNA, 24 bp, Artificial Sequence
  Description of Artificial Sequence:  Hypothetical Probe Sequence
acggcgtttgtcttgaaggacagc

SEQ ID NO: 4046 - DNA, 24 bp, Artificial Sequence
  Description of Artificial Sequence:  Hypothetical Probe Sequence
acggcgttctcattgaaaagcgaa

SEQ ID NO: 4047 - DNA, 24 bp, Artificial Sequence
  Description of Artificial Sequence:  Hypothetical Probe Sequence
acggcgttctgtacctcttgtgcg

SEQ ID NO: 4048 - DNA, 24 bp, Artificial Sequence
  Description of Artificial Sequence:  Hypothetical Probe Sequence
acggcgttgcttgcttaggagtgc

SEQ ID NO: 4049 - DNA, 24 bp, Artificial Sequence
  Description of Artificial Sequence:  Hypothetical Probe Sequence
acggcgttggtatcgtaggacgtt

SEQ ID NO: 4050 - DNA, 24 bp, Artificial Sequence
  Description of Artificial Sequence:  Hypothetical Probe Sequence
acggcgttacctagtgacggctgt

SEQ ID NO: 4051 - DNA, 24 bp, Artificial Sequence
  Description of Artificial Sequence:  Hypothetical Probe Sequence
acggcgttaggaatcggtctcgtt

SEQ ID NO: 4052 - DNA, 24 bp, Artificial Sequence
  Description of Artificial Sequence:  Hypothetical Probe Sequence
acggcgttcctaaatcgtgcttga

SEQ ID NO: 4053 - DNA, 24 bp, Artificial Sequence
  Description of Artificial Sequence:  Hypothetical Probe Sequence
acggcgtttgcgttgagatgagcc

SEQ ID NO: 4054 - DNA, 24 bp, Artificial Sequence
  Description of Artificial Sequence:  Hypothetical Probe Sequence
acggcgttcacggtcttcgttcgt

SEQ ID NO: 4055 - DNA, 24 bp, Artificial Sequence
  Description of Artificial Sequence:  Hypothetical Probe Sequence
acggcgttcagctgcgtgatctca

SEQ ID NO: 4056 - DNA, 24 bp, Artificial Sequence
  Description of Artificial Sequence:  Hypothetical Probe Sequence
acggcgttggacacctgctttgtc

SEQ ID NO: 4057 - DNA, 24 bp, Artificial Sequence
  Description of Artificial Sequence:  Hypothetical Probe Sequence
acggcgttacggtacaatcgtgcg

SEQ ID NO: 4058 - DNA, 24 bp, Artificial Sequence
  Description of Artificial Sequence:  Hypothetical Probe Sequence
acggctcatgatcacgacggcttg

SEQ ID NO: 4059 - DNA, 24 bp, Artificial Sequence
  Description of Artificial Sequence:  Hypothetical Probe Sequence
acggctcattaggcaacgttcgaa

SEQ ID NO: 4060 - DNA, 24 bp, Artificial Sequence
  Description of Artificial Sequence:  Hypothetical Probe Sequence
acggctcaaaaggtgcgcaaaatc

SEQ ID NO: 4061 - DNA, 24 bp, Artificial Sequence
  Description of Artificial Sequence:  Hypothetical Probe Sequence
acggctcatcgtatcgagtgacgg

SEQ ID NO: 4062 - DNA, 24 bp, Artificial Sequence
  Description of Artificial Sequence:  Hypothetical Probe Sequence
acggctcacgttctgtccatgctt

SEQ ID NO: 4063 - DNA, 24 bp, Artificial Sequence
  Description of Artificial Sequence:  Hypothetical Probe Sequence
acggctcagcttgcaatgcgaatc

SEQ ID NO: 4064 - DNA, 24 bp, Artificial Sequence
  Description of Artificial Sequence:  Hypothetical Probe Sequence
acggctcaggtaatacggacgtgc

SEQ ID NO: 4065 - DNA, 24 bp, Artificial Sequence
  Description of Artificial Sequence:  Hypothetical Probe Sequence
acggctcagcaaaggactgtacgg

SEQ ID NO: 4066 - DNA, 24 bp, Artificial Sequence
  Description of Artificial Sequence:  Hypothetical Probe Sequence
acggctcacctacctaagccgtgc

SEQ ID NO: 4067 - DNA, 24 bp, Artificial Sequence
  Description of Artificial Sequence:  Hypothetical Probe Sequence
acggctcatgcggatgagtgtgcg

SEQ ID NO: 4068 - DNA, 24 bp, Artificial Sequence
  Description of Artificial Sequence:  Hypothetical Probe Sequence
acggctcagacccttggtgcttga

SEQ ID NO: 4069 - DNA, 24 bp, Artificial Sequence
  Description of Artificial Sequence:  Hypothetical Probe Sequence
acggctgtaatctctgtcccgtgc

SEQ ID NO: 4070 - DNA, 24 bp, Artificial Sequence
  Description of Artificial Sequence:  Hypothetical Probe Sequence
acggctgttctgggacgaccgatg

SEQ ID NO: 4071 - DNA, 24 bp, Artificial Sequence
  Description of Artificial Sequence:  Hypothetical Probe Sequence
acggctgtcgaaagtggaccggta

SEQ ID NO: 4072 - DNA, 24 bp, Artificial Sequence
  Description of Artificial Sequence:  Hypothetical Probe Sequence
acggctgtgcttctgtgcaaagga

SEQ ID NO: 4073 - DNA, 24 bp, Artificial Sequence
  Description of Artificial Sequence:  Hypothetical Probe Sequence
acggctgtgtcttgcggagtcagc

SEQ ID NO: 4074 - DNA, 24 bp, Artificial Sequence
  Description of Artificial Sequence:  Hypothetical Probe Sequence
acggctgtgagtagtgagcccagc

SEQ ID NO: 4075 - DNA, 24 bp, Artificial Sequence
  Description of Artificial Sequence:  Hypothetical Probe Sequence
acggctgtaccttgtcagccgcaa

SEQ ID NO: 4076 - DNA, 24 bp, Artificial Sequence
  Description of Artificial Sequence:  Hypothetical Probe Sequence
acggctgtacggtgattcgtgcaa

SEQ ID NO: 4077 - DNA, 24 bp, Artificial Sequence
  Description of Artificial Sequence:  Hypothetical Probe Sequence
acggccattgtccgtttctgctgt

SEQ ID NO: 4078 - DNA, 24 bp, Artificial Sequence
  Description of Artificial Sequence:  Hypothetical Probe Sequence
acggccattcgtgtgccctaggta

SEQ ID NO: 4079 - DNA, 24 bp, Artificial Sequence
  Description of Artificial Sequence:  Hypothetical Probe Sequence
acggccatctcaacctcttgccat

SEQ ID NO: 4080 - DNA, 24 bp, Artificial Sequence
  Description of Artificial Sequence:  Hypothetical Probe Sequence
acggccatagtgccatagccagga

SEQ ID NO: 4081 - DNA, 24 bp, Artificial Sequence
  Description of Artificial Sequence:  Hypothetical Probe Sequence
acggccatcctagctttgtctccc

SEQ ID NO: 4082 - DNA, 24 bp, Artificial Sequence
  Description of Artificial Sequence:  Hypothetical Probe Sequence
acggccattcccccatctgtcacg

SEQ ID NO: 4083 - DNA, 24 bp, Artificial Sequence
  Description of Artificial Sequence:  Hypothetical Probe Sequence
acggccattgcgcgttgagtcgtt

SEQ ID NO: 4084 - DNA, 24 bp, Artificial Sequence
  Description of Artificial Sequence:  Hypothetical Probe Sequence
acggccatgaccctgtccatacgg

SEQ ID NO: 4085 - DNA, 24 bp, Artificial Sequence
  Description of Artificial Sequence:  Hypothetical Probe Sequence
acggccatagcccctaaaaggcaa

SEQ ID NO: 4086 - DNA, 24 bp, Artificial Sequence
  Description of Artificial Sequence:  Hypothetical Probe Sequence
acggcgaattgaagtgatcggctt

SEQ ID NO: 4087 - DNA, 24 bp, Artificial Sequence
  Description of Artificial Sequence:  Hypothetical Probe Sequence
acggcgaatgataggacagcgatg

SEQ ID NO: 4088 - DNA, 24 bp, Artificial Sequence
  Description of Artificial Sequence:  Hypothetical Probe Sequence
acggcgaattaggatgcttgacgg

SEQ ID NO: 4089 - DNA, 24 bp, Artificial Sequence
  Description of Artificial Sequence:  Hypothetical Probe Sequence
acggcgaaaatctacaatcggtgc

SEQ ID NO: 4090 - DNA, 24 bp, Artificial Sequence
  Description of Artificial Sequence:  Hypothetical Probe Sequence
acggcgaatctgtctgggtatcgt

SEQ ID NO: 4091 - DNA, 24 bp, Artificial Sequence
  Description of Artificial Sequence:  Hypothetical Probe Sequence
acggcgaatcgttgatcgtttccc

SEQ ID NO: 4092 - DNA, 24 bp, Artificial Sequence
  Description of Artificial Sequence:  Hypothetical Probe Sequence
acggcgaacttggagtgtgcatcg

SEQ ID NO: 4093 - DNA, 24 bp, Artificial Sequence
  Description of Artificial Sequence:  Hypothetical Probe Sequence
acggcgaacgtttcgtctgtcgaa

SEQ ID NO: 4094 - DNA, 24 bp, Artificial Sequence
  Description of Artificial Sequence:  Hypothetical Probe Sequence
acggcgaactcattgaccatcgtt

SEQ ID NO: 4095 - DNA, 24 bp, Artificial Sequence
  Description of Artificial Sequence:  Hypothetical Probe Sequence
acggcgaaggtatctgagtgcgtt

SEQ ID NO: 4096 - DNA, 24 bp, Artificial Sequence
  Description of Artificial Sequence:  Hypothetical Probe Sequence
acggcgaagagtgatggatgtgcg

SEQ ID NO: 4097 - DNA, 24 bp, Artificial Sequence
  Description of Artificial Sequence:  Hypothetical Probe Sequence
acggcgaaatcgaggatgtctgcg

SEQ ID NO: 4098 - DNA, 24 bp, Artificial Sequence
  Description of Artificial Sequence:  Hypothetical Probe Sequence
acggcgaatcccacctgcttggta

SEQ ID NO: 4099 - DNA, 24 bp, Artificial Sequence
  Description of Artificial Sequence:  Hypothetical Probe Sequence
acggcgaacacgcttggagttcgt

SEQ ID NO: 4100 - DNA, 24 bp, Artificial Sequence
  Description of Artificial Sequence:  Hypothetical Probe Sequence
acggcgaagtgcacggtcgtccta

SEQ ID NO: 4101 - DNA, 24 bp, Artificial Sequence
  Description of Artificial Sequence:  Hypothetical Probe Sequence
acggcgaaggacctcacacgctgt

SEQ ID NO: 4102 - DNA, 24 bp, Artificial Sequence
  Description of Artificial Sequence:  Hypothetical Probe Sequence
acggcgaaagccaatccgaacttg

SEQ ID NO: 4103 - DNA, 24 bp, Artificial Sequence
  Description of Artificial Sequence:  Hypothetical Probe Sequence
acgggcttttgacctaatcgcttg

SEQ ID NO: 4104 - DNA, 24 bp, Artificial Sequence
  Description of Artificial Sequence:  Hypothetical Probe Sequence
acgggctttgattacatgcgatcg

SEQ ID NO: 4105 - DNA, 24 bp, Artificial Sequence
  Description of Artificial Sequence:  Hypothetical Probe Sequence
acgggcttttaggtgccgttctca

SEQ ID NO: 4106 - DNA, 24 bp, Artificial Sequence
  Description of Artificial Sequence:  Hypothetical Probe Sequence
acgggcttaaagcctatccccagc

SEQ ID NO: 4107 - DNA, 24 bp, Artificial Sequence
  Description of Artificial Sequence:  Hypothetical Probe Sequence
acgggctttacatcgtcagcagga

SEQ ID NO: 4108 - DNA, 24 bp, Artificial Sequence
  Description of Artificial Sequence:  Hypothetical Probe Sequence
acgggcttcgttctcacgtttccc

SEQ ID NO: 4109 - DNA, 24 bp, Artificial Sequence
  Description of Artificial Sequence:  Hypothetical Probe Sequence
acgggcttctcatcgtcctaagcc

SEQ ID NO: 4110 - DNA, 24 bp, Artificial Sequence
  Description of Artificial Sequence:  Hypothetical Probe Sequence
acgggcttctgtaggagcttcgaa

SEQ ID NO: 4111 - DNA, 24 bp, Artificial Sequence
  Description of Artificial Sequence:  Hypothetical Probe Sequence
acgggcttggtaaaagctgtcgaa

SEQ ID NO: 4112 - DNA, 24 bp, Artificial Sequence
  Description of Artificial Sequence:  Hypothetical Probe Sequence
acgggcttgagtggtagtgccgtt

SEQ ID NO: 4113 - DNA, 24 bp, Artificial Sequence
  Description of Artificial Sequence:  Hypothetical Probe Sequence
acgggctttcccgcttccatccta

SEQ ID NO: 4114 - DNA, 24 bp, Artificial Sequence
  Description of Artificial Sequence:  Hypothetical Probe Sequence
acgggcttgaccttgattagtgcg

SEQ ID NO: 4115 - DNA, 24 bp, Artificial Sequence
  Description of Artificial Sequence:  Hypothetical Probe Sequence
acggggtatgatcacggatgccta

SEQ ID NO: 4116 - DNA, 24 bp, Artificial Sequence
  Description of Artificial Sequence:  Hypothetical Probe Sequence
acggggtatacaagccgtgcttga

SEQ ID NO: 4117 - DNA, 24 bp, Artificial Sequence
  Description of Artificial Sequence:  Hypothetical Probe Sequence
acggggtatctgacggagtgtccc

SEQ ID NO: 4118 - DNA, 24 bp, Artificial Sequence
  Description of Artificial Sequence:  Hypothetical Probe Sequence
acggggtacgttcacgaatctcgt

SEQ ID NO: 4119 - DNA, 24 bp, Artificial Sequence
  Description of Artificial Sequence:  Hypothetical Probe Sequence
acggggtactgtgagttccccacg

SEQ ID NO: 4120 - DNA, 24 bp, Artificial Sequence
  Description of Artificial Sequence:  Hypothetical Probe Sequence
acggggtagcttggtacagccgaa

SEQ ID NO: 4121 - DNA, 24 bp, Artificial Sequence
  Description of Artificial Sequence:  Hypothetical Probe Sequence
acggggtagcaaaatccgaagacc

SEQ ID NO: 4122 - DNA, 24 bp, Artificial Sequence
  Description of Artificial Sequence:  Hypothetical Probe Sequence
acggggtaaggagtctcacgagcc

SEQ ID NO: 4123 - DNA, 24 bp, Artificial Sequence
  Description of Artificial Sequence:  Hypothetical Probe Sequence
acggggtacctatccctcgtccat

SEQ ID NO: 4124 - DNA, 24 bp, Artificial Sequence
  Description of Artificial Sequence:  Hypothetical Probe Sequence
acggggtatgcgcgttaggagacc

SEQ ID NO: 4125 - DNA, 24 bp, Artificial Sequence
  Description of Artificial Sequence:  Hypothetical Probe Sequence
acggggtagtgcatacgagttgcg

SEQ ID NO: 4126 - DNA, 24 bp, Artificial Sequence
  Description of Artificial Sequence:  Hypothetical Probe Sequence
acggggtaggactctgcttgagcc

SEQ ID NO: 4127 - DNA, 24 bp, Artificial Sequence
  Description of Artificial Sequence:  Hypothetical Probe Sequence
acggggtaacggcctaaatccacg

SEQ ID NO: 4128 - DNA, 24 bp, Artificial Sequence
  Description of Artificial Sequence:  Hypothetical Probe Sequence
acggggtaagcccgaactgtacgg

SEQ ID NO: 4129 - DNA, 24 bp, Artificial Sequence
  Description of Artificial Sequence:  Hypothetical Probe Sequence
acgggtctaaagcgaatccccttg

SEQ ID NO: 4130 - DNA, 24 bp, Artificial Sequence
  Description of Artificial Sequence:  Hypothetical Probe Sequence
acgggtctcgttgcaagatggtgc

SEQ ID NO: 4131 - DNA, 24 bp, Artificial Sequence
  Description of Artificial Sequence:  Hypothetical Probe Sequence
acgggtctctcaagccacctcgtt

SEQ ID NO: 4132 - DNA, 24 bp, Artificial Sequence
  Description of Artificial Sequence:  Hypothetical Probe Sequence
acgggtctcgaaggacgtctggac

SEQ ID NO: 4133 - DNA, 24 bp, Artificial Sequence
  Description of Artificial Sequence:  Hypothetical Probe Sequence
acgggtctatcgacgggcttcgaa

SEQ ID NO: 4134 - DNA, 24 bp, Artificial Sequence
  Description of Artificial Sequence:  Hypothetical Probe Sequence
acgggtctgacccttgggactcgt

SEQ ID NO: 4135 - DNA, 24 bp, Artificial Sequence
  Description of Artificial Sequence:  Hypothetical Probe Sequence
acgggtctgtgcaaaggatgtccc

SEQ ID NO: 4136 - DNA, 24 bp, Artificial Sequence
  Description of Artificial Sequence:  Hypothetical Probe Sequence
acgggtctacgggacctcgtggac

SEQ ID NO: 4137 - DNA, 24 bp, Artificial Sequence
  Description of Artificial Sequence:  Hypothetical Probe Sequence
acgggagttgatctgttcccccat

SEQ ID NO: 4138 - DNA, 24 bp, Artificial Sequence
  Description of Artificial Sequence:  Hypothetical Probe Sequence
acgggagtcttgcagcaccttccc

SEQ ID NO: 4139 - DNA, 24 bp, Artificial Sequence
  Description of Artificial Sequence:  Hypothetical Probe Sequence
acgggagtctcaagccaaagccat

SEQ ID NO: 4140 - DNA, 24 bp, Artificial Sequence
  Description of Artificial Sequence:  Hypothetical Probe Sequence
acgggagtggtaagtggtgcgcaa

SEQ ID NO: 4141 - DNA, 24 bp, Artificial Sequence
  Description of Artificial Sequence:  Hypothetical Probe Sequence
acgggagtgatggtgctctggcaa

SEQ ID NO: 4142 - DNA, 24 bp, Artificial Sequence
  Description of Artificial Sequence:  Hypothetical Probe Sequence
acgggagttcccctgtcacgatcg

SEQ ID NO: 4143 - DNA, 24 bp, Artificial Sequence
  Description of Artificial Sequence:  Hypothetical Probe Sequence
acgggagtcagctgatgaccgacc

SEQ ID NO: 4144 - DNA, 24 bp, Artificial Sequence
  Description of Artificial Sequence:  Hypothetical Probe Sequence
acgggcaaaatcagtgccatccat

SEQ ID NO: 4145 - DNA, 24 bp, Artificial Sequence
  Description of Artificial Sequence:  Hypothetical Probe Sequence
acgggcaaatacagtgatcggcaa

SEQ ID NO: 4146 - DNA, 24 bp, Artificial Sequence
  Description of Artificial Sequence:  Hypothetical Probe Sequence
acgggcaatacacttgagccggta

SEQ ID NO: 4147 - DNA, 24 bp, Artificial Sequence
  Description of Artificial Sequence:  Hypothetical Probe Sequence
acgggcaacgttttagcctaagcc

SEQ ID NO: 4148 - DNA, 24 bp, Artificial Sequence
  Description of Artificial Sequence:  Hypothetical Probe Sequence
acgggcaagcttcgaacagctctg

SEQ ID NO: 4149 - DNA, 24 bp, Artificial Sequence
  Description of Artificial Sequence:  Hypothetical Probe Sequence
acgggcaagagtctcagaccccat

SEQ ID NO: 4150 - DNA, 24 bp, Artificial Sequence
  Description of Artificial Sequence:  Hypothetical Probe Sequence
acgggcaagcaaatcgcgttgtct

SEQ ID NO: 4151 - DNA, 24 bp, Artificial Sequence
  Description of Artificial Sequence:  Hypothetical Probe Sequence
acgggcaacctacacgcctaggta

SEQ ID NO: 4152 - DNA, 24 bp, Artificial Sequence
  Description of Artificial Sequence:  Hypothetical Probe Sequence
acgggcaaacggccatgtctcgaa

SEQ ID NO: 4153 - DNA, 24 bp, Artificial Sequence
  Description of Artificial Sequence:  Hypothetical Probe Sequence
acgggcaaagcctctgcctagtgc

SEQ ID NO: 4154 - DNA, 24 bp, Artificial Sequence
  Description of Artificial Sequence:  Hypothetical Probe Sequence
acggagtgcgaattgatcgttccc

SEQ ID NO: 4155 - DNA, 24 bp, Artificial Sequence
  Description of Artificial Sequence:  Hypothetical Probe Sequence
acggagtgggtacgaagtgcgacc

SEQ ID NO: 4156 - DNA, 24 bp, Artificial Sequence
  Description of Artificial Sequence:  Hypothetical Probe Sequence
acggagtggagttgtctccccagc

SEQ ID NO: 4157 - DNA, 24 bp, Artificial Sequence
  Description of Artificial Sequence:  Hypothetical Probe Sequence
acggagtggcaacagccttgacct

SEQ ID NO: 4158 - DNA, 24 bp, Artificial Sequence
  Description of Artificial Sequence:  Hypothetical Probe Sequence
acggagtgatcgtcgtctcaacgg

SEQ ID NO: 4159 - DNA, 24 bp, Artificial Sequence
  Description of Artificial Sequence:  Hypothetical Probe Sequence
acggagtgcctacgtttgtccgtt

SEQ ID NO: 4160 - DNA, 24 bp, Artificial Sequence
  Description of Artificial Sequence:  Hypothetical Probe Sequence
acggagtgtgcgtcgtgcaaggta

SEQ ID NO: 4161 - DNA, 24 bp, Artificial Sequence
  Description of Artificial Sequence:  Hypothetical Probe Sequence
acggagtgggacgcttgcaacagc

SEQ ID NO: 4162 - DNA, 24 bp, Artificial Sequence
  Description of Artificial Sequence:  Hypothetical Probe Sequence
acggaccttgatgatgtcccacgg

SEQ ID NO: 4163 - DNA, 24 bp, Artificial Sequence
  Description of Artificial Sequence:  Hypothetical Probe Sequence
acggaccttgtccgttgacccgtt

SEQ ID NO: 4164 - DNA, 24 bp, Artificial Sequence
  Description of Artificial Sequence:  Hypothetical Probe Sequence
acggacctcttgcacgcctaagga

SEQ ID NO: 4165 - DNA, 24 bp, Artificial Sequence
  Description of Artificial Sequence:  Hypothetical Probe Sequence
acggacctgcttaaagccatcacg

SEQ ID NO: 4166 - DNA, 24 bp, Artificial Sequence
  Description of Artificial Sequence:  Hypothetical Probe Sequence
acggacctgtctgaccccatcgaa

SEQ ID NO: 4167 - DNA, 24 bp, Artificial Sequence
  Description of Artificial Sequence:  Hypothetical Probe Sequence
acggaccttcccgagtttgaacgg

SEQ ID NO: 4168 - DNA, 24 bp, Artificial Sequence
  Description of Artificial Sequence:  Hypothetical Probe Sequence
acggacctgaccaaagacgggctt

SEQ ID NO: 4169 - DNA, 24 bp, Artificial Sequence
  Description of Artificial Sequence:  Hypothetical Probe Sequence
acggacctagccgctttctgtccc

SEQ ID NO: 4170 - DNA, 24 bp, Artificial Sequence
  Description of Artificial Sequence:  Hypothetical Probe Sequence
acggatcgaaagtcccaaagacgg

SEQ ID NO: 4171 - DNA, 24 bp, Artificial Sequence
  Description of Artificial Sequence:  Hypothetical Probe Sequence
acggatcgtgtccgaacacgagcc

SEQ ID NO: 4172 - DNA, 24 bp, Artificial Sequence
  Description of Artificial Sequence:  Hypothetical Probe Sequence
acggatcgctcacgaatccctctg

SEQ ID NO: 4173 - DNA, 24 bp, Artificial Sequence
  Description of Artificial Sequence:  Hypothetical Probe Sequence
acggatcgctgtctgtgatgcgaa

SEQ ID NO: 4174 - DNA, 24 bp, Artificial Sequence
  Description of Artificial Sequence:  Hypothetical Probe Sequence
acggatcggagtcgaacgaacacg

SEQ ID NO: 4175 - DNA, 24 bp, Artificial Sequence
  Description of Artificial Sequence:  Hypothetical Probe Sequence
acggatcggcaacttggaccctca

SEQ ID NO: 4176 - DNA, 24 bp, Artificial Sequence
  Description of Artificial Sequence:  Hypothetical Probe Sequence
acggatcgagtgtctgccatcacg

SEQ ID NO: 4177 - DNA, 24 bp, Artificial Sequence
  Description of Artificial Sequence:  Hypothetical Probe Sequence
acggatcgacctcttgacggggta

SEQ ID NO: 4178 - DNA, 24 bp, Artificial Sequence
  Description of Artificial Sequence:  Hypothetical Probe Sequence
acggatcgcagctccctgatgctt

SEQ ID NO: 4179 - DNA, 24 bp, Artificial Sequence
  Description of Artificial Sequence:  Hypothetical Probe Sequence
acggatcgggacggacttagccat

SEQ ID NO: 4180 - DNA, 24 bp, Artificial Sequence
  Description of Artificial Sequence:  Hypothetical Probe Sequence
acggatcgacggctcagagttgcg

SEQ ID NO: 4181 - DNA, 24 bp, Artificial Sequence
  Description of Artificial Sequence:  Hypothetical Probe Sequence
acggatcgagcccctaaggagtgc

SEQ ID NO: 4182 - DNA, 24 bp, Artificial Sequence
  Description of Artificial Sequence:  Hypothetical Probe Sequence
acggaggatctggcaaacctatcg

SEQ ID NO: 4183 - DNA, 24 bp, Artificial Sequence
  Description of Artificial Sequence:  Hypothetical Probe Sequence
acggaggaccataatcgatgacgg

SEQ ID NO: 4184 - DNA, 24 bp, Artificial Sequence
  Description of Artificial Sequence:  Hypothetical Probe Sequence
acggaggagcttgtgccgttacct

SEQ ID NO: 4185 - DNA, 24 bp, Artificial Sequence
  Description of Artificial Sequence:  Hypothetical Probe Sequence
acggaggaggtatcgtgtgctgcg

SEQ ID NO: 4186 - DNA, 24 bp, Artificial Sequence
  Description of Artificial Sequence:  Hypothetical Probe Sequence
acggaggagtctagcccacgtgcg

SEQ ID NO: 4187 - DNA, 24 bp, Artificial Sequence
  Description of Artificial Sequence:  Hypothetical Probe Sequence
acggaggagcaaagccaatcctgt

SEQ ID NO: 4188 - DNA, 24 bp, Artificial Sequence
  Description of Artificial Sequence:  Hypothetical Probe Sequence
acggaggatgcgcctaacctcacg

SEQ ID NO: 4189 - DNA, 24 bp, Artificial Sequence
  Description of Artificial Sequence:  Hypothetical Probe Sequence
acggcctatctggagtcagccgtt

SEQ ID NO: 4190 - DNA, 24 bp, Artificial Sequence
  Description of Artificial Sequence:  Hypothetical Probe Sequence
acggcctactgtggacacggcttg

SEQ ID NO: 4191 - DNA, 24 bp, Artificial Sequence
  Description of Artificial Sequence:  Hypothetical Probe Sequence
acggcctagagttcgtggaccagc

SEQ ID NO: 4192 - DNA, 24 bp, Artificial Sequence
  Description of Artificial Sequence:  Hypothetical Probe Sequence
acggcctacctatccctgtcacgg

SEQ ID NO: 4193 - DNA, 24 bp, Artificial Sequence
  Description of Artificial Sequence:  Hypothetical Probe Sequence
acgggatgaatcccataggaacgg

SEQ ID NO: 4194 - DNA, 24 bp, Artificial Sequence
  Description of Artificial Sequence:  Hypothetical Probe Sequence
acgggatgccatcgaattagtccc

SEQ ID NO: 4195 - DNA, 24 bp, Artificial Sequence
  Description of Artificial Sequence:  Hypothetical Probe Sequence
acgggatgatcggagtcgtttgcg

SEQ ID NO: 4196 - DNA, 24 bp, Artificial Sequence
  Description of Artificial Sequence:  Hypothetical Probe Sequence
acgggatgcctaagtgcttgtccc

SEQ ID NO: 4197 - DNA, 24 bp, Artificial Sequence
  Description of Artificial Sequence:  Hypothetical Probe Sequence
acgggatgggaccacgatactccc

SEQ ID NO: 4198 - DNA, 24 bp, Artificial Sequence
  Description of Artificial Sequence:  Hypothetical Probe Sequence
acgggatgagccgtgcacggatac

SEQ ID NO: 4199 - DNA, 24 bp, Artificial Sequence
  Description of Artificial Sequence:  Hypothetical Probe Sequence
acggtcccttgacgttgcaaaaag

SEQ ID NO: 4200 - DNA, 24 bp, Artificial Sequence
  Description of Artificial Sequence:  Hypothetical Probe Sequence
acggtcccctcaaatcacggatcg

SEQ ID NO: 4201 - DNA, 24 bp, Artificial Sequence
  Description of Artificial Sequence:  Hypothetical Probe Sequence
acggtcccccatacctgaccggta

SEQ ID NO: 4202 - DNA, 24 bp, Artificial Sequence
  Description of Artificial Sequence:  Hypothetical Probe Sequence
acggtcccagtgtgtctgcgacct

SEQ ID NO: 4203 - DNA, 24 bp, Artificial Sequence
  Description of Artificial Sequence:  Hypothetical Probe Sequence
acggtcccatcggcttgtctcagc

SEQ ID NO: 4204 - DNA, 24 bp, Artificial Sequence
  Description of Artificial Sequence:  Hypothetical Probe Sequence
acggtccccctatcgtgatgctgt

SEQ ID NO: 4205 - DNA, 24 bp, Artificial Sequence
  Description of Artificial Sequence:  Hypothetical Probe Sequence
acggtcccgatgtgatttagcacg

SEQ ID NO: 4206 - DNA, 24 bp, Artificial Sequence
  Description of Artificial Sequence:  Hypothetical Probe Sequence
acggtgcgttgaatacagccgacc

SEQ ID NO: 4207 - DNA, 24 bp, Artificial Sequence
  Description of Artificial Sequence:  Hypothetical Probe Sequence
acggtgcgtgataggatctggctt

SEQ ID NO: 4208 - DNA, 24 bp, Artificial Sequence
  Description of Artificial Sequence:  Hypothetical Probe Sequence
acggtgcgttagggacgaccacct

SEQ ID NO: 4209 - DNA, 24 bp, Artificial Sequence
  Description of Artificial Sequence:  Hypothetical Probe Sequence
acggtgcgatacaatcatcgcgtt

SEQ ID NO: 4210 - DNA, 24 bp, Artificial Sequence
  Description of Artificial Sequence:  Hypothetical Probe Sequence
acggtgcgtacacgttggacccta

SEQ ID NO: 4211 - DNA, 24 bp, Artificial Sequence
  Description of Artificial Sequence:  Hypothetical Probe Sequence
acggtgcgcttgcctaaggacacg

SEQ ID NO: 4212 - DNA, 24 bp, Artificial Sequence
  Description of Artificial Sequence:  Hypothetical Probe Sequence
acggtgcgccatatacgaccagga

SEQ ID NO: 4213 - DNA, 24 bp, Artificial Sequence
  Description of Artificial Sequence:  Hypothetical Probe Sequence
acggtgcgagtgctgtcagccagc

SEQ ID NO: 4214 - DNA, 24 bp, Artificial Sequence
  Description of Artificial Sequence:  Hypothetical Probe Sequence
acggtgcgaggactcagatgcagc

SEQ ID NO: 4215 - DNA, 24 bp, Artificial Sequence
  Description of Artificial Sequence:  Hypothetical Probe Sequence
acggtgcgtgcgcacgaatcctgt

SEQ ID NO: 4216 - DNA, 24 bp, Artificial Sequence
  Description of Artificial Sequence:  Hypothetical Probe Sequence
acggtgcgcacggtgcctgtccta

SEQ ID NO: 4217 - DNA, 24 bp, Artificial Sequence
  Description of Artificial Sequence:  Hypothetical Probe Sequence
acggtgcgcagcacctccatgctt

SEQ ID NO: 4218 - DNA, 24 bp, Artificial Sequence
  Description of Artificial Sequence:  Hypothetical Probe Sequence
acggtgcggtgcgagtgcttcgtt

SEQ ID NO: 4219 - DNA, 24 bp, Artificial Sequence
  Description of Artificial Sequence:  Hypothetical Probe Sequence
acggtgcgggaccagcacctcttg

SEQ ID NO: 4220 - DNA, 24 bp, Artificial Sequence
  Description of Artificial Sequence:  Hypothetical Probe Sequence
acggtgcgagcccttggagtgctt

SEQ ID NO: 4221 - DNA, 24 bp, Artificial Sequence
  Description of Artificial Sequence:  Hypothetical Probe Sequence
acggcacgttgaggactgattccc

SEQ ID NO: 4222 - DNA, 24 bp, Artificial Sequence
  Description of Artificial Sequence:  Hypothetical Probe Sequence
acggcacgtgatacggtgatcgtt

SEQ ID NO: 4223 - DNA, 24 bp, Artificial Sequence
  Description of Artificial Sequence:  Hypothetical Probe Sequence
acggcacgttagagtgatcgcgaa

SEQ ID NO: 4224 - DNA, 24 bp, Artificial Sequence
  Description of Artificial Sequence:  Hypothetical Probe Sequence
acggcacgaatccagctctgacgg

SEQ ID NO: 4225 - DNA, 24 bp, Artificial Sequence
  Description of Artificial Sequence:  Hypothetical Probe Sequence
acggcacgtacatgattgcgccta

SEQ ID NO: 4226 - DNA, 24 bp, Artificial Sequence
  Description of Artificial Sequence:  Hypothetical Probe Sequence
acggcacgtctgctcaatcgatcg

SEQ ID NO: 4227 - DNA, 24 bp, Artificial Sequence
  Description of Artificial Sequence:  Hypothetical Probe Sequence
acggcacgtcgtgcttcgaatctg

SEQ ID NO: 4228 - DNA, 24 bp, Artificial Sequence
  Description of Artificial Sequence:  Hypothetical Probe Sequence
acggcacggagtctcacagcggac

SEQ ID NO: 4229 - DNA, 24 bp, Artificial Sequence
  Description of Artificial Sequence:  Hypothetical Probe Sequence
acggcacgacctcgaatctgagga

SEQ ID NO: 4230 - DNA, 24 bp, Artificial Sequence
  Description of Artificial Sequence:  Hypothetical Probe Sequence
acggcacgcagctgatggacggta

SEQ ID NO: 4231 - DNA, 24 bp, Artificial Sequence
  Description of Artificial Sequence:  Hypothetical Probe Sequence
acggcacgggacggacggtatctg

SEQ ID NO: 4232 - DNA, 24 bp, Artificial Sequence
  Description of Artificial Sequence:  Hypothetical Probe Sequence
acggcacgacggtcgtgagtcgaa

SEQ ID NO: 4233 - DNA, 24 bp, Artificial Sequence
  Description of Artificial Sequence:  Hypothetical Probe Sequence
acggcagcttagaaagccattcgt

SEQ ID NO: 4234 - DNA, 24 bp, Artificial Sequence
  Description of Artificial Sequence:  Hypothetical Probe Sequence
acggcagctgtccgaaataccacg

SEQ ID NO: 4235 - DNA, 24 bp, Artificial Sequence
  Description of Artificial Sequence:  Hypothetical Probe Sequence
acggcagccttgctcagatggctt

SEQ ID NO: 4236 - DNA, 24 bp, Artificial Sequence
  Description of Artificial Sequence:  Hypothetical Probe Sequence
acggcagcctgtttagacggcgaa

SEQ ID NO: 4237 - DNA, 24 bp, Artificial Sequence
  Description of Artificial Sequence:  Hypothetical Probe Sequence
acggcagcccataatccacgtctg

SEQ ID NO: 4238 - DNA, 24 bp, Artificial Sequence
  Description of Artificial Sequence:  Hypothetical Probe Sequence
acggcagccgaactgttcgtgtgc

SEQ ID NO: 4239 - DNA, 24 bp, Artificial Sequence
  Description of Artificial Sequence:  Hypothetical Probe Sequence
acggcagcgcttgagtgagttgcg

SEQ ID NO: 4240 - DNA, 24 bp, Artificial Sequence
  Description of Artificial Sequence:  Hypothetical Probe Sequence
acggcagcggtacacgttagcgaa

SEQ ID NO: 4241 - DNA, 24 bp, Artificial Sequence
  Description of Artificial Sequence:  Hypothetical Probe Sequence
acggcagcaggagtctacggctgt

SEQ ID NO: 4242 - DNA, 24 bp, Artificial Sequence
  Description of Artificial Sequence:  Hypothetical Probe Sequence
acggcagccacgaggagcaattga

SEQ ID NO: 4243 - DNA, 24 bp, Artificial Sequence
  Description of Artificial Sequence:  Hypothetical Probe Sequence
acggcagccagcctgtcgaacagc

SEQ ID NO: 4244 - DNA, 24 bp, Artificial Sequence
  Description of Artificial Sequence:  Hypothetical Probe Sequence
acggcagcgtgccctatcccaatc

SEQ ID NO: 4245 - DNA, 24 bp, Artificial Sequence
  Description of Artificial Sequence:  Hypothetical Probe Sequence
acggcagcacggtcgtgaccagtg

SEQ ID NO: 4246 - DNA, 24 bp, Artificial Sequence
  Description of Artificial Sequence:  Hypothetical Probe Sequence
acgggaccttgattgacgttcagc

SEQ ID NO: 4247 - DNA, 24 bp, Artificial Sequence
  Description of Artificial Sequence:  Hypothetical Probe Sequence
acgggaccaatcacctgaccatcg

SEQ ID NO: 4248 - DNA, 24 bp, Artificial Sequence
  Description of Artificial Sequence:  Hypothetical Probe Sequence
acgggaccaaagaatcgatggacc

SEQ ID NO: 4249 - DNA, 24 bp, Artificial Sequence
  Description of Artificial Sequence:  Hypothetical Probe Sequence
acgggacctacacagcgcaactgt

SEQ ID NO: 4250 - DNA, 24 bp, Artificial Sequence
  Description of Artificial Sequence:  Hypothetical Probe Sequence
acgggacccgttgtcttcgtagcc

SEQ ID NO: 4251 - DNA, 24 bp, Artificial Sequence
  Description of Artificial Sequence:  Hypothetical Probe Sequence
acgggaccctcagtgcgatgacct

SEQ ID NO: 4252 - DNA, 24 bp, Artificial Sequence
  Description of Artificial Sequence:  Hypothetical Probe Sequence
acgggaccccatacctcgaacgaa

SEQ ID NO: 4253 - DNA, 24 bp, Artificial Sequence
  Description of Artificial Sequence:  Hypothetical Probe Sequence
acgggacccgaactcatgtcgctt

SEQ ID NO: 4254 - DNA, 24 bp, Artificial Sequence
  Description of Artificial Sequence:  Hypothetical Probe Sequence
acgggaccgcttaatccctagcaa

SEQ ID NO: 4255 - DNA, 24 bp, Artificial Sequence
  Description of Artificial Sequence:  Hypothetical Probe Sequence
acgggaccatcgtcccacctaatc

SEQ ID NO: 4256 - DNA, 24 bp, Artificial Sequence
  Description of Artificial Sequence:  Hypothetical Probe Sequence
acgggaccgatggatgcagctgtc

SEQ ID NO: 4257 - DNA, 24 bp, Artificial Sequence
  Description of Artificial Sequence:  Hypothetical Probe Sequence
acgggacctcccatcgggtattga

SEQ ID NO: 4258 - DNA, 24 bp, Artificial Sequence
  Description of Artificial Sequence:  Hypothetical Probe Sequence
acgggacccagccgaacctaatcg

SEQ ID NO: 4259 - DNA, 24 bp, Artificial Sequence
  Description of Artificial Sequence:  Hypothetical Probe Sequence
acgggaccgtgcggacttaggtgc

SEQ ID NO: 4260 - DNA, 24 bp, Artificial Sequence
  Description of Artificial Sequence:  Hypothetical Probe Sequence
acgggtgcttgagtctagcccagc

SEQ ID NO: 4261 - DNA, 24 bp, Artificial Sequence
  Description of Artificial Sequence:  Hypothetical Probe Sequence
acgggtgctgatttgaatcgagcc

SEQ ID NO: 4262 - DNA, 24 bp, Artificial Sequence
  Description of Artificial Sequence:  Hypothetical Probe Sequence
acgggtgcttagtctggctttccc

SEQ ID NO: 4263 - DNA, 24 bp, Artificial Sequence
  Description of Artificial Sequence:  Hypothetical Probe Sequence
acgggtgcaatcgcttcttgagcc

SEQ ID NO: 4264 - DNA, 24 bp, Artificial Sequence
  Description of Artificial Sequence:  Hypothetical Probe Sequence
acgggtgcatacacctgacccgtt

SEQ ID NO: 4265 - DNA, 24 bp, Artificial Sequence
  Description of Artificial Sequence:  Hypothetical Probe Sequence
acgggtgctgtcggactctgcagc

SEQ ID NO: 4266 - DNA, 24 bp, Artificial Sequence
  Description of Artificial Sequence:  Hypothetical Probe Sequence
acgggtgcctcactgttgtcacgg

SEQ ID NO: 4267 - DNA, 24 bp, Artificial Sequence
  Description of Artificial Sequence:  Hypothetical Probe Sequence
acgggtgccgaagacccctaaatc

SEQ ID NO: 4268 - DNA, 24 bp, Artificial Sequence
  Description of Artificial Sequence:  Hypothetical Probe Sequence
acgggtgcgcttgcttttgaggac

SEQ ID NO: 4269 - DNA, 24 bp, Artificial Sequence
  Description of Artificial Sequence:  Hypothetical Probe Sequence
acgggtgcgtctcctaacggacct

SEQ ID NO: 4270 - DNA, 24 bp, Artificial Sequence
  Description of Artificial Sequence:  Hypothetical Probe Sequence
acgggtgcgcaacagctgatccat

SEQ ID NO: 4271 - DNA, 24 bp, Artificial Sequence
  Description of Artificial Sequence:  Hypothetical Probe Sequence
acgggtgcagtggaccacggtaca

SEQ ID NO: 4272 - DNA, 24 bp, Artificial Sequence
  Description of Artificial Sequence:  Hypothetical Probe Sequence
acgggtgcacctgcaactcatctg

SEQ ID NO: 4273 - DNA, 24 bp, Artificial Sequence
  Description of Artificial Sequence:  Hypothetical Probe Sequence
acgggtgctgcgaggaataccacg

SEQ ID NO: 4274 - DNA, 24 bp, Artificial Sequence
  Description of Artificial Sequence:  Hypothetical Probe Sequence
acgggtgcgaccatcgggtactca

SEQ ID NO: 4275 - DNA, 24 bp, Artificial Sequence
  Description of Artificial Sequence:  Hypothetical Probe Sequence
acgggtgcggaccacgggtatgtc

SEQ ID NO: 4276 - DNA, 24 bp, Artificial Sequence
  Description of Artificial Sequence:  Hypothetical Probe Sequence
acggggacttgaaaagttgatgcg

SEQ ID NO: 4277 - DNA, 24 bp, Artificial Sequence
  Description of Artificial Sequence:  Hypothetical Probe Sequence
acggggacttagtgcggcaaccta

SEQ ID NO: 4278 - DNA, 24 bp, Artificial Sequence
  Description of Artificial Sequence:  Hypothetical Probe Sequence
acggggactacaacggggacctca

SEQ ID NO: 4279 - DNA, 24 bp, Artificial Sequence
  Description of Artificial Sequence:  Hypothetical Probe Sequence
acggggaccttgacggttgatcgt

SEQ ID NO: 4280 - DNA, 24 bp, Artificial Sequence
  Description of Artificial Sequence:  Hypothetical Probe Sequence
acggggaccgttatcgcgaagagt

SEQ ID NO: 4281 - DNA, 24 bp, Artificial Sequence
  Description of Artificial Sequence:  Hypothetical Probe Sequence
acggggacggtaaggaaatcgctt

SEQ ID NO: 4282 - DNA, 24 bp, Artificial Sequence
  Description of Artificial Sequence:  Hypothetical Probe Sequence
acggggacgcaaagtgccatagga

SEQ ID NO: 4283 - DNA, 24 bp, Artificial Sequence
  Description of Artificial Sequence:  Hypothetical Probe Sequence
acggggacacctgagttcccagtg

SEQ ID NO: 4284 - DNA, 24 bp, Artificial Sequence
  Description of Artificial Sequence:  Hypothetical Probe Sequence
acggggacatcgtcccatcgatac

SEQ ID NO: 4285 - DNA, 24 bp, Artificial Sequence
  Description of Artificial Sequence:  Hypothetical Probe Sequence
acggggactcccgatgctcaatcg

SEQ ID NO: 4286 - DNA, 24 bp, Artificial Sequence
  Description of Artificial Sequence:  Hypothetical Probe Sequence
acggggactgcgctgtgcttggac

SEQ ID NO: 4287 - DNA, 24 bp, Artificial Sequence
  Description of Artificial Sequence:  Hypothetical Probe Sequence
acggggacgtgcgcaacctaacct

SEQ ID NO: 4288 - DNA, 24 bp, Artificial Sequence
  Description of Artificial Sequence:  Hypothetical Probe Sequence
acggacggttgaggtacacgagga

SEQ ID NO: 4289 - DNA, 24 bp, Artificial Sequence
  Description of Artificial Sequence:  Hypothetical Probe Sequence
acggacggtacacgaacagcctca

SEQ ID NO: 4290 - DNA, 24 bp, Artificial Sequence
  Description of Artificial Sequence:  Hypothetical Probe Sequence
acggacggtctgaatcaccttgcg

SEQ ID NO: 4291 - DNA, 24 bp, Artificial Sequence
  Description of Artificial Sequence:  Hypothetical Probe Sequence
acggacggtcgtggtagaccgctt

SEQ ID NO: 4292 - DNA, 24 bp, Artificial Sequence
  Description of Artificial Sequence:  Hypothetical Probe Sequence
acggacggctcagtcttcccggta

SEQ ID NO: 4293 - DNA, 24 bp, Artificial Sequence
  Description of Artificial Sequence:  Hypothetical Probe Sequence
acggacgggagttcgtaatctgcg

SEQ ID NO: 4294 - DNA, 24 bp, Artificial Sequence
  Description of Artificial Sequence:  Hypothetical Probe Sequence
acggacgggcaatcgtcagctgat

SEQ ID NO: 4295 - DNA, 24 bp, Artificial Sequence
  Description of Artificial Sequence:  Hypothetical Probe Sequence
acggacggacctggtagtgctcgt

SEQ ID NO: 4296 - DNA, 24 bp, Artificial Sequence
  Description of Artificial Sequence:  Hypothetical Probe Sequence
acggacgggatgtcccaaagaatc

SEQ ID NO: 4297 - DNA, 24 bp, Artificial Sequence
  Description of Artificial Sequence:  Hypothetical Probe Sequence
acggacggtccctctgggtacagc

SEQ ID NO: 4298 - DNA, 24 bp, Artificial Sequence
  Description of Artificial Sequence:  Hypothetical Probe Sequence
acggacggcagcttgacgaatcgt

SEQ ID NO: 4299 - DNA, 24 bp, Artificial Sequence
  Description of Artificial Sequence:  Hypothetical Probe Sequence
acggacgggtgcctgtcgaacacg

SEQ ID NO: 4300 - DNA, 24 bp, Artificial Sequence
  Description of Artificial Sequence:  Hypothetical Probe Sequence
acggacggagccgcttgtctagcc

SEQ ID NO: 4301 - DNA, 24 bp, Artificial Sequence
  Description of Artificial Sequence:  Hypothetical Probe Sequence
acggagccttagcttggaccggta

SEQ ID NO: 4302 - DNA, 24 bp, Artificial Sequence
  Description of Artificial Sequence:  Hypothetical Probe Sequence
acggagccaatcgtctatcggcaa

SEQ ID NO: 4303 - DNA, 24 bp, Artificial Sequence
  Description of Artificial Sequence:  Hypothetical Probe Sequence
acggagcctgtccgaagcaactgt

SEQ ID NO: 4304 - DNA, 24 bp, Artificial Sequence
  Description of Artificial Sequence:  Hypothetical Probe Sequence
acggagcctcgtggtatgattccc

SEQ ID NO: 4305 - DNA, 24 bp, Artificial Sequence
  Description of Artificial Sequence:  Hypothetical Probe Sequence
acggagccctgttcccaatcaatc

SEQ ID NO: 4306 - DNA, 24 bp, Artificial Sequence
  Description of Artificial Sequence:  Hypothetical Probe Sequence
acggagcccgaagatgggtaagcc

SEQ ID NO: 4307 - DNA, 24 bp, Artificial Sequence
  Description of Artificial Sequence:  Hypothetical Probe Sequence
acggagccagtgggactgtcggac

SEQ ID NO: 4308 - DNA, 24 bp, Artificial Sequence
  Description of Artificial Sequence:  Hypothetical Probe Sequence
acggagcccctatacatcccccat

SEQ ID NO: 4309 - DNA, 24 bp, Artificial Sequence
  Description of Artificial Sequence:  Hypothetical Probe Sequence
acggagccgatgaatcaggaatcg

SEQ ID NO: 4310 - DNA, 24 bp, Artificial Sequence
  Description of Artificial Sequence:  Hypothetical Probe Sequence
acggagcctcccgcaaggtagtgc

SEQ ID NO: 4311 - DNA, 24 bp, Artificial Sequence
  Description of Artificial Sequence:  Hypothetical Probe Sequence
acggagcccagcgatgttgaacgg

SEQ ID NO: 4312 - DNA, 24 bp, Artificial Sequence
  Description of Artificial Sequence:  Hypothetical Probe Sequence
acggagccgacccctatgtccacg

SEQ ID NO: 4313 - DNA, 24 bp, Artificial Sequence
  Description of Artificial Sequence:  Hypothetical Probe Sequence
acggagccggacgatgctgtcacg

SEQ ID NO: 4314 - DNA, 24 bp, Artificial Sequence
  Description of Artificial Sequence:  Hypothetical Probe Sequence
acggagccacggttgacgttccat

SEQ ID NO: 4315 - DNA, 24 bp, Artificial Sequence
  Description of Artificial Sequence:  Hypothetical Probe Sequence
agccttgaaaagtgcgcgaaagtg

SEQ ID NO: 4316 - DNA, 24 bp, Artificial Sequence
  Description of Artificial Sequence:  Hypothetical Probe Sequence
agccttgatcgtgcttgcaaagcc

SEQ ID NO: 4317 - DNA, 24 bp, Artificial Sequence
  Description of Artificial Sequence:  Hypothetical Probe Sequence
agccttgacgttctcaagcccacg

SEQ ID NO: 4318 - DNA, 24 bp, Artificial Sequence
  Description of Artificial Sequence:  Hypothetical Probe Sequence
agccttgagcttgtgcacgggacc

SEQ ID NO: 4319 - DNA, 24 bp, Artificial Sequence
  Description of Artificial Sequence:  Hypothetical Probe Sequence
agccttgagcaatgtcgatgcgaa

SEQ ID NO: 4320 - DNA, 24 bp, Artificial Sequence
  Description of Artificial Sequence:  Hypothetical Probe Sequence
agccttgaaggaacctggaccgaa

SEQ ID NO: 4321 - DNA, 24 bp, Artificial Sequence
  Description of Artificial Sequence:  Hypothetical Probe Sequence
agccttgagatgtgcgacggcgtt

SEQ ID NO: 4322 - DNA, 24 bp, Artificial Sequence
  Description of Artificial Sequence:  Hypothetical Probe Sequence
agccttgaggacgcaacttgtgcg

SEQ ID NO: 4323 - DNA, 24 bp, Artificial Sequence
  Description of Artificial Sequence:  Hypothetical Probe Sequence
agcctgatgcttacggtgtctgcg

SEQ ID NO: 4324 - DNA, 24 bp, Artificial Sequence
  Description of Artificial Sequence:  Hypothetical Probe Sequence
agccttaggcttcagcgatggatg

SEQ ID NO: 4325 - DNA, 24 bp, Artificial Sequence
  Description of Artificial Sequence:  Hypothetical Probe Sequence
agccttagcagcatcgcttggagt

SEQ ID NO: 4326 - DNA, 24 bp, Artificial Sequence
  Description of Artificial Sequence:  Hypothetical Probe Sequence
agccaatccgtttgtcgtgcgagt

SEQ ID NO: 4327 - DNA, 24 bp, Artificial Sequence
  Description of Artificial Sequence:  Hypothetical Probe Sequence
agccaatcgcaagagtacgggtgc

SEQ ID NO: 4328 - DNA, 24 bp, Artificial Sequence
  Description of Artificial Sequence:  Hypothetical Probe Sequence
agccaatcagtgagccacggtccc

SEQ ID NO: 4329 - DNA, 24 bp, Artificial Sequence
  Description of Artificial Sequence:  Hypothetical Probe Sequence
agccaatcaggatgcggcttttag

SEQ ID NO: 4330 - DNA, 24 bp, Artificial Sequence
  Description of Artificial Sequence:  Hypothetical Probe Sequence
agccaatccctatgtctccccacg

SEQ ID NO: 4331 - DNA, 24 bp, Artificial Sequence
  Description of Artificial Sequence:  Hypothetical Probe Sequence
agccaatcgatgaaagtgcggtct

SEQ ID NO: 4332 - DNA, 24 bp, Artificial Sequence
  Description of Artificial Sequence:  Hypothetical Probe Sequence
agccaatcggactacacacgtccc

SEQ ID NO: 4333 - DNA, 24 bp, Artificial Sequence
  Description of Artificial Sequence:  Hypothetical Probe Sequence
agccaatcagccctgtacggctca

SEQ ID NO: 4334 - DNA, 24 bp, Artificial Sequence
  Description of Artificial Sequence:  Hypothetical Probe Sequence
agccataccgttacggtgtccagc

SEQ ID NO: 4335 - DNA, 24 bp, Artificial Sequence
  Description of Artificial Sequence:  Hypothetical Probe Sequence
agccatacgcttctcaatcggctt

SEQ ID NO: 4336 - DNA, 24 bp, Artificial Sequence
  Description of Artificial Sequence:  Hypothetical Probe Sequence
agccatacacctggacccattccc

SEQ ID NO: 4337 - DNA, 24 bp, Artificial Sequence
  Description of Artificial Sequence:  Hypothetical Probe Sequence
agccatacaggatcccgtgcgatg

SEQ ID NO: 4338 - DNA, 24 bp, Artificial Sequence
  Description of Artificial Sequence:  Hypothetical Probe Sequence
agccataccagcgaccggacacct

SEQ ID NO: 4339 - DNA, 24 bp, Artificial Sequence
  Description of Artificial Sequence:  Hypothetical Probe Sequence
agccatacgtgcctcatgcgccta

SEQ ID NO: 4340 - DNA, 24 bp, Artificial Sequence
  Description of Artificial Sequence:  Hypothetical Probe Sequence
agccaaagtgattcccgacctccc

SEQ ID NO: 4341 - DNA, 24 bp, Artificial Sequence
  Description of Artificial Sequence:  Hypothetical Probe Sequence
agccaaagtctggcaagctttgcg

SEQ ID NO: 4342 - DNA, 24 bp, Artificial Sequence
  Description of Artificial Sequence:  Hypothetical Probe Sequence
agccaaaggcaaggacagtgagcc

SEQ ID NO: 4343 - DNA, 24 bp, Artificial Sequence
  Description of Artificial Sequence:  Hypothetical Probe Sequence
agccaaagagtggtgcgtgcacgg

SEQ ID NO: 4344 - DNA, 24 bp, Artificial Sequence
  Description of Artificial Sequence:  Hypothetical Probe Sequence
agccaaagaggactcacgaaacgg

SEQ ID NO: 4345 - DNA, 24 bp, Artificial Sequence
  Description of Artificial Sequence:  Hypothetical Probe Sequence
agccaaagcctatgattcccatcg

SEQ ID NO: 4346 - DNA, 24 bp, Artificial Sequence
  Description of Artificial Sequence:  Hypothetical Probe Sequence
agccaaaggaccttgacacgagcc

SEQ ID NO: 4347 - DNA, 24 bp, Artificial Sequence
  Description of Artificial Sequence:  Hypothetical Probe Sequence
agcctacatgcgatactgcgccat

SEQ ID NO: 4348 - DNA, 24 bp, Artificial Sequence
  Description of Artificial Sequence:  Hypothetical Probe Sequence
agcctctgcttgttgacacgcacg

SEQ ID NO: 4349 - DNA, 24 bp, Artificial Sequence
  Description of Artificial Sequence:  Hypothetical Probe Sequence
agcctctgctcagaccggacgctt

SEQ ID NO: 4350 - DNA, 24 bp, Artificial Sequence
  Description of Artificial Sequence:  Hypothetical Probe Sequence
agcctctgctgtatcgcgaaggac

SEQ ID NO: 4351 - DNA, 24 bp, Artificial Sequence
  Description of Artificial Sequence:  Hypothetical Probe Sequence
agcctctggagtcacgcgaaccat

SEQ ID NO: 4352 - DNA, 24 bp, Artificial Sequence
  Description of Artificial Sequence:  Hypothetical Probe Sequence
agcctctggatgaaaggatggcaa

SEQ ID NO: 4353 - DNA, 24 bp, Artificial Sequence
  Description of Artificial Sequence:  Hypothetical Probe Sequence
agcctctgggacatcgagccaaag

SEQ ID NO: 4354 - DNA, 24 bp, Artificial Sequence
  Description of Artificial Sequence:  Hypothetical Probe Sequence
agcctgtctgcgcgaatacatccc

SEQ ID NO: 4355 - DNA, 24 bp, Artificial Sequence
  Description of Artificial Sequence:  Hypothetical Probe Sequence
agcctgtccagcaaagcagcacct

SEQ ID NO: 4356 - DNA, 24 bp, Artificial Sequence
  Description of Artificial Sequence:  Hypothetical Probe Sequence
agcctcgtttgatgtcgcttagcc

SEQ ID NO: 4357 - DNA, 24 bp, Artificial Sequence
  Description of Artificial Sequence:  Hypothetical Probe Sequence
agcctcgttgtctacatgcggacc

SEQ ID NO: 4358 - DNA, 24 bp, Artificial Sequence
  Description of Artificial Sequence:  Hypothetical Probe Sequence
agcctcgtgagtggacagcccttg

SEQ ID NO: 4359 - DNA, 24 bp, Artificial Sequence
  Description of Artificial Sequence:  Hypothetical Probe Sequence
agcctcgtgcaacgaagcaaggta

SEQ ID NO: 4360 - DNA, 24 bp, Artificial Sequence
  Description of Artificial Sequence:  Hypothetical Probe Sequence
agcctcgtacctcgaaagccgagt

SEQ ID NO: 4361 - DNA, 24 bp, Artificial Sequence
  Description of Artificial Sequence:  Hypothetical Probe Sequence
agcctcgttcccgacccttgagga

SEQ ID NO: 4362 - DNA, 24 bp, Artificial Sequence
  Description of Artificial Sequence:  Hypothetical Probe Sequence
agcctcgttgcgatactcgttccc

SEQ ID NO: 4363 - DNA, 24 bp, Artificial Sequence
  Description of Artificial Sequence:  Hypothetical Probe Sequence
agcccttgttgagcttgcaagctt

SEQ ID NO: 4364 - DNA, 24 bp, Artificial Sequence
  Description of Artificial Sequence:  Hypothetical Probe Sequence
agcccttgctcaaggattgaagcc

SEQ ID NO: 4365 - DNA, 24 bp, Artificial Sequence
  Description of Artificial Sequence:  Hypothetical Probe Sequence
agcccttgctgtacctacggccta

SEQ ID NO: 4366 - DNA, 24 bp, Artificial Sequence
  Description of Artificial Sequence:  Hypothetical Probe Sequence
agcccttggtctatcgcttgggac

SEQ ID NO: 4367 - DNA, 24 bp, Artificial Sequence
  Description of Artificial Sequence:  Hypothetical Probe Sequence
agcccttggcaaagcctgtcccta

SEQ ID NO: 4368 - DNA, 24 bp, Artificial Sequence
  Description of Artificial Sequence:  Hypothetical Probe Sequence
agcccttgagtgatcgcgttcgaa

SEQ ID NO: 4369 - DNA, 24 bp, Artificial Sequence
  Description of Artificial Sequence:  Hypothetical Probe Sequence
agcccttgcctagtctagccccat

SEQ ID NO: 4370 - DNA, 24 bp, Artificial Sequence
  Description of Artificial Sequence:  Hypothetical Probe Sequence
agcccttggaccgagttcccgatg

SEQ ID NO: 4371 - DNA, 24 bp, Artificial Sequence
  Description of Artificial Sequence:  Hypothetical Probe Sequence
agcccttgggactgtccttgctgt

SEQ ID NO: 4372 - DNA, 24 bp, Artificial Sequence
  Description of Artificial Sequence:  Hypothetical Probe Sequence
agcccttgagccaaaggatgagcc

SEQ ID NO: 4373 - DNA, 24 bp, Artificial Sequence
  Description of Artificial Sequence:  Hypothetical Probe Sequence
agcccgttaatcgtgcggtaatcg

SEQ ID NO: 4374 - DNA, 24 bp, Artificial Sequence
  Description of Artificial Sequence:  Hypothetical Probe Sequence
agcccgtttacaaatccgttcacg

SEQ ID NO: 4375 - DNA, 24 bp, Artificial Sequence
  Description of Artificial Sequence:  Hypothetical Probe Sequence
agcccgttggtacgaatacaacgg

SEQ ID NO: 4376 - DNA, 24 bp, Artificial Sequence
  Description of Artificial Sequence:  Hypothetical Probe Sequence
agcccgttgagtaaagcgttcgtt

SEQ ID NO: 4377 - DNA, 24 bp, Artificial Sequence
  Description of Artificial Sequence:  Hypothetical Probe Sequence
agcccgttagtgaaagacggagcc

SEQ ID NO: 4378 - DNA, 24 bp, Artificial Sequence
  Description of Artificial Sequence:  Hypothetical Probe Sequence
agcccgttatcgtgattgcgtgat

SEQ ID NO: 4379 - DNA, 24 bp, Artificial Sequence
  Description of Artificial Sequence:  Hypothetical Probe Sequence
agcccgtttcccgatgccatgatg

SEQ ID NO: 4380 - DNA, 24 bp, Artificial Sequence
  Description of Artificial Sequence:  Hypothetical Probe Sequence
agcccgtttgcgcgttctcacacg

SEQ ID NO: 4381 - DNA, 24 bp, Artificial Sequence
  Description of Artificial Sequence:  Hypothetical Probe Sequence
agcccgttgaccatactgcgacct

SEQ ID NO: 4382 - DNA, 24 bp, Artificial Sequence
  Description of Artificial Sequence:  Hypothetical Probe Sequence
agcccgttgtgctacaatcggacc

SEQ ID NO: 4383 - DNA, 24 bp, Artificial Sequence
  Description of Artificial Sequence:  Hypothetical Probe Sequence
agccctcattgatgtctgcggctt

SEQ ID NO: 4384 - DNA, 24 bp, Artificial Sequence
  Description of Artificial Sequence:  Hypothetical Probe Sequence
agccctcatgatccattgcgttga

SEQ ID NO: 4385 - DNA, 24 bp, Artificial Sequence
  Description of Artificial Sequence:  Hypothetical Probe Sequence
agccctcaaaaggcaagcaaacgg

SEQ ID NO: 4386 - DNA, 24 bp, Artificial Sequence
  Description of Artificial Sequence:  Hypothetical Probe Sequence
agccctcacttggagttgcgagcc

SEQ ID NO: 4387 - DNA, 24 bp, Artificial Sequence
  Description of Artificial Sequence:  Hypothetical Probe Sequence
agccctcaccatggacgcttctgt

SEQ ID NO: 4388 - DNA, 24 bp, Artificial Sequence
  Description of Artificial Sequence:  Hypothetical Probe Sequence
agccctgttgatatcggaccccat

SEQ ID NO: 4389 - DNA, 24 bp, Artificial Sequence
  Description of Artificial Sequence:  Hypothetical Probe Sequence
agccctgttgtcatacgtgcacgg

SEQ ID NO: 4390 - DNA, 24 bp, Artificial Sequence
  Description of Artificial Sequence:  Hypothetical Probe Sequence
agccctgtccatgcaagtgcctca

SEQ ID NO: 4391 - DNA, 24 bp, Artificial Sequence
  Description of Artificial Sequence:  Hypothetical Probe Sequence
agccctgtgctttcgtcacgggta

SEQ ID NO: 4392 - DNA, 24 bp, Artificial Sequence
  Description of Artificial Sequence:  Hypothetical Probe Sequence
agccctgtggtagcaaagccgatg

SEQ ID NO: 4393 - DNA, 24 bp, Artificial Sequence
  Description of Artificial Sequence:  Hypothetical Probe Sequence
agccctgtacctcagcgcaacgtt

SEQ ID NO: 4394 - DNA, 24 bp, Artificial Sequence
  Description of Artificial Sequence:  Hypothetical Probe Sequence
agccctgtatcgcctaacgggagt

SEQ ID NO: 4395 - DNA, 24 bp, Artificial Sequence
  Description of Artificial Sequence:  Hypothetical Probe Sequence
agccctgtcacggtgccgttccta

SEQ ID NO: 4396 - DNA, 24 bp, Artificial Sequence
  Description of Artificial Sequence:  Hypothetical Probe Sequence
agccctgtagcccttgggtaacgg

SEQ ID NO: 4397 - DNA, 24 bp, Artificial Sequence
  Description of Artificial Sequence:  Hypothetical Probe Sequence
agccccatttgattagcgttcacg

SEQ ID NO: 4398 - DNA, 24 bp, Artificial Sequence
  Description of Artificial Sequence:  Hypothetical Probe Sequence
agccccataatccgaagtgcgctt

SEQ ID NO: 4399 - DNA, 24 bp, Artificial Sequence
  Description of Artificial Sequence:  Hypothetical Probe Sequence
agccccataaagtcccgatgacct

SEQ ID NO: 4400 - DNA, 24 bp, Artificial Sequence
  Description of Artificial Sequence:  Hypothetical Probe Sequence
agccccattacatcgtgaccgatg

SEQ ID NO: 4401 - DNA, 24 bp, Artificial Sequence
  Description of Artificial Sequence:  Hypothetical Probe Sequence
agccccattgtcgtctacgggctt

SEQ ID NO: 4402 - DNA, 24 bp, Artificial Sequence
  Description of Artificial Sequence:  Hypothetical Probe Sequence
agccccattcgtctcagatgcacg

SEQ ID NO: 4403 - DNA, 24 bp, Artificial Sequence
  Description of Artificial Sequence:  Hypothetical Probe Sequence
agccccatctcagatgggacctgt

SEQ ID NO: 4404 - DNA, 24 bp, Artificial Sequence
  Description of Artificial Sequence:  Hypothetical Probe Sequence3> Abramites sp.
agccccatcgaacacggtctatcg

SEQ ID NO: 4405 - DNA, 24 bp, Artificial Sequence
  Description of Artificial Sequence:  Hypothetical Probe Sequence
agccccatcagcccataaagcacg

SEQ ID NO: 4406 - DNA, 24 bp, Artificial Sequence
  Description of Artificial Sequence:  Hypothetical Probe Sequence
agccccatacggcctacgaagcaa

SEQ ID NO: 4407 - DNA, 24 bp, Artificial Sequence
  Description of Artificial Sequence:  Hypothetical Probe Sequence
agcccgaattgaacctcgttcagc

SEQ ID NO: 4408 - DNA, 24 bp, Artificial Sequence
  Description of Artificial Sequence:  Hypothetical Probe Sequence
agcccgaaataccgaacttgggac

SEQ ID NO: 4409 - DNA, 24 bp, Artificial Sequence
  Description of Artificial Sequence:  Hypothetical Probe Sequence
agcccgaaaaagatacgtcttgcg

SEQ ID NO: 4410 - DNA, 24 bp, Artificial Sequence
  Description of Artificial Sequence:  Hypothetical Probe Sequence
agcccgaatacacttgggaccagc

SEQ ID NO: 4411 - DNA, 24 bp, Artificial Sequence
  Description of Artificial Sequence:  Hypothetical Probe Sequence
agcccgaatcgtgtgcatcgaatc

SEQ ID NO: 4412 - DNA, 24 bp, Artificial Sequence
  Description of Artificial Sequence:  Hypothetical Probe Sequence
agcccgaacttgggtatgcggtct

SEQ ID NO: 4413 - DNA, 24 bp, Artificial Sequence
  Description of Artificial Sequence:  Hypothetical Probe Sequence
agcccgaactcagtctacggcacg

SEQ ID NO: 4414 - DNA, 24 bp, Artificial Sequence
  Description of Artificial Sequence:  Hypothetical Probe Sequence
agcccgaacgaactgttctgcagc

SEQ ID NO: 4415 - DNA, 24 bp, Artificial Sequence
  Description of Artificial Sequence:  Hypothetical Probe Sequence
agcccgaagcttacggagtggatg

SEQ ID NO: 4416 - DNA, 24 bp, Artificial Sequence
  Description of Artificial Sequence:  Hypothetical Probe Sequence
agcccgaagagtgtctgcaaacgg

SEQ ID NO: 4417 - DNA, 24 bp, Artificial Sequence
  Description of Artificial Sequence:  Hypothetical Probe Sequence
agcccgaaatcgctgtagccctca

SEQ ID NO: 4418 - DNA, 24 bp, Artificial Sequence
  Description of Artificial Sequence:  Hypothetical Probe Sequence
agcccgaaaggatctgacggatcg

SEQ ID NO: 4419 - DNA, 24 bp, Artificial Sequence
  Description of Artificial Sequence:  Hypothetical Probe Sequence
agcccgaatgcgcgttaccttcgt

SEQ ID NO: 4420 - DNA, 24 bp, Artificial Sequence
  Description of Artificial Sequence:  Hypothetical Probe Sequence
agcccgaacacgtcccaaagttga

SEQ ID NO: 4421 - DNA, 24 bp, Artificial Sequence
  Description of Artificial Sequence:  Hypothetical Probe Sequence
agcccgaaggacggtatgtccgaa

SEQ ID NO: 4422 - DNA, 24 bp, Artificial Sequence
  Description of Artificial Sequence:  Hypothetical Probe Sequence
agcccgaaacggggactctgggac

SEQ ID NO: 4423 - DNA, 24 bp, Artificial Sequence
  Description of Artificial Sequence:  Hypothetical Probe Sequence
agccgctttgataggaagtgacgg

SEQ ID NO: 4424 - DNA, 24 bp, Artificial Sequence
  Description of Artificial Sequence:  Hypothetical Probe Sequence
agccgcttttagggtacgaaacgg

SEQ ID NO: 4425 - DNA, 24 bp, Artificial Sequence
  Description of Artificial Sequence:  Hypothetical Probe Sequence
agccgcttatactgtcagcccgtt

SEQ ID NO: 4426 - DNA, 24 bp, Artificial Sequence
  Description of Artificial Sequence:  Hypothetical Probe Sequence
agccgctttgtcgcttggtacgtt

SEQ ID NO: 4427 - DNA, 24 bp, Artificial Sequence
  Description of Artificial Sequence:  Hypothetical Probe Sequence
agccgcttcttgtgatgcaacgaa

SEQ ID NO: 4428 - DNA, 24 bp, Artificial Sequence
  Description of Artificial Sequence:  Hypothetical Probe Sequence
agccgcttctgttcgtgatgacgg

SEQ ID NO: 4429 - DNA, 24 bp, Artificial Sequence
  Description of Artificial Sequence:  Hypothetical Probe Sequence
agccgcttccatttgagaccgacc

SEQ ID NO: 4430 - DNA, 24 bp, Artificial Sequence
  Description of Artificial Sequence:  Hypothetical Probe Sequence
agccgcttggtaggacgtctgtgc

SEQ ID NO: 4431 - DNA, 24 bp, Artificial Sequence
  Description of Artificial Sequence:  Hypothetical Probe Sequence
agccgctttgcgctcaacggttga

SEQ ID NO: 4432 - DNA, 24 bp, Artificial Sequence
  Description of Artificial Sequence:  Hypothetical Probe Sequence
agccgcttcagcgagtacgggatg

SEQ ID NO: 4433 - DNA, 24 bp, Artificial Sequence
  Description of Artificial Sequence:  Hypothetical Probe Sequence
agccgcttgtgccacgtcccatac

SEQ ID NO: 4434 - DNA, 24 bp, Artificial Sequence
  Description of Artificial Sequence:  Hypothetical Probe Sequence
agccggtattgatcccctcaagga

SEQ ID NO: 4435 - DNA, 24 bp, Artificial Sequence
  Description of Artificial Sequence:  Hypothetical Probe Sequence
agccggtaaatcacctgtgccgtt

SEQ ID NO: 4436 - DNA, 24 bp, Artificial Sequence
  Description of Artificial Sequence:  Hypothetical Probe Sequence
agccggtaaaaggtcttgcgctgt

SEQ ID NO: 4437 - DNA, 24 bp, Artificial Sequence
  Description of Artificial Sequence:  Hypothetical Probe Sequence
agccggtatctgccatcttggctt

SEQ ID NO: 4438 - DNA, 24 bp, Artificial Sequence
  Description of Artificial Sequence:  Hypothetical Probe Sequence
agccggtatcgtttgacgttcgaa

SEQ ID NO: 4439 - DNA, 24 bp, Artificial Sequence
  Description of Artificial Sequence:  Hypothetical Probe Sequence
agccggtactgttcccagccgcaa

SEQ ID NO: 4440 - DNA, 24 bp, Artificial Sequence
  Description of Artificial Sequence:  Hypothetical Probe Sequence
agccggtaggtaccataggatgcg

SEQ ID NO: 4441 - DNA, 24 bp, Artificial Sequence
  Description of Artificial Sequence:  Hypothetical Probe Sequence
agccggtagagtcagcatcgggac

SEQ ID NO: 4442 - DNA, 24 bp, Artificial Sequence
  Description of Artificial Sequence:  Hypothetical Probe Sequence
agccggtatccccttgtcgtacgg

SEQ ID NO: 4443 - DNA, 24 bp, Artificial Sequence
  Description of Artificial Sequence:  Hypothetical Probe Sequence
agccgtctaatcggacccattgcg

SEQ ID NO: 4444 - DNA, 24 bp, Artificial Sequence
  Description of Artificial Sequence:  Hypothetical Probe Sequence
agccgtcttacaatcgatcgccat

SEQ ID NO: 4445 - DNA, 24 bp, Artificial Sequence
  Description of Artificial Sequence:  Hypothetical Probe Sequence
agccgtctaccttcgtagccctca

SEQ ID NO: 4446 - DNA, 24 bp, Artificial Sequence
  Description of Artificial Sequence:  Hypothetical Probe Sequence
agccgtctgatgtcgtgctttcgt

SEQ ID NO: 4447 - DNA, 24 bp, Artificial Sequence
  Description of Artificial Sequence:  Hypothetical Probe Sequence
agccgtctcacgatcgtgtcggac

SEQ ID NO: 4448 - DNA, 24 bp, Artificial Sequence
  Description of Artificial Sequence:  Hypothetical Probe Sequence
agccgtctcagcacggcttgttga

SEQ ID NO: 4449 - DNA, 24 bp, Artificial Sequence
  Description of Artificial Sequence:  Hypothetical Probe Sequence
agccgtctgaccgagtgaccggac

SEQ ID NO: 4450 - DNA, 24 bp, Artificial Sequence
  Description of Artificial Sequence:  Hypothetical Probe Sequence
agccgtctagccaatcgcttgctt

SEQ ID NO: 4451 - DNA, 24 bp, Artificial Sequence
  Description of Artificial Sequence:  Hypothetical Probe Sequence
agccgagttgtccacgccatggac

SEQ ID NO: 4452 - DNA, 24 bp, Artificial Sequence
  Description of Artificial Sequence:  Hypothetical Probe Sequence
agccgagttcgtgagtagcctccc

SEQ ID NO: 4453 - DNA, 24 bp, Artificial Sequence
  Description of Artificial Sequence:  Hypothetical Probe Sequence
agccgagtgtcttacatgcgcacg

SEQ ID NO: 4454 - DNA, 24 bp, Artificial Sequence
  Description of Artificial Sequence:  Hypothetical Probe Sequence
agccgagtatcgcagcctgtgcaa

SEQ ID NO: 4455 - DNA, 24 bp, Artificial Sequence
  Description of Artificial Sequence:  Hypothetical Probe Sequence
agccgagtcctattgatccccgtt

SEQ ID NO: 4456 - DNA, 24 bp, Artificial Sequence
  Description of Artificial Sequence:  Hypothetical Probe Sequence
agccgagtgatgtcccgagtcgtt

SEQ ID NO: 4457 - DNA, 24 bp, Artificial Sequence
  Description of Artificial Sequence:  Hypothetical Probe Sequence
agccgagttgcgttgactgtggac

SEQ ID NO: 4458 - DNA, 24 bp, Artificial Sequence
  Description of Artificial Sequence:  Hypothetical Probe Sequence
agccgagtagcccagcctcacagc

SEQ ID NO: 4459 - DNA, 24 bp, Artificial Sequence
  Description of Artificial Sequence:  Hypothetical Probe Sequence
agccgcaattgaaggagcaacagc

SEQ ID NO: 4460 - DNA, 24 bp, Artificial Sequence
  Description of Artificial Sequence:  Hypothetical Probe Sequence
agccgcaatgatagcctgatcacg

SEQ ID NO: 4461 - DNA, 24 bp, Artificial Sequence
  Description of Artificial Sequence:  Hypothetical Probe Sequence
agccgcaattagcgaatgcgatac

SEQ ID NO: 4462 - DNA, 24 bp, Artificial Sequence
  Description of Artificial Sequence:  Hypothetical Probe Sequence
agccgcaatacaagtgtccctccc

SEQ ID NO: 4463 - DNA, 24 bp, Artificial Sequence
  Description of Artificial Sequence:  Hypothetical Probe Sequence
agccgcaatctgggtaggaccgtt

SEQ ID NO: 4464 - DNA, 24 bp, Artificial Sequence
  Description of Artificial Sequence:  Hypothetical Probe Sequence
agccgcaacgtttgcgtgatatcg

SEQ ID NO: 4465 - DNA, 24 bp, Artificial Sequence
  Description of Artificial Sequence:  Hypothetical Probe Sequence
agccgcaactcaaggaagcctctg

SEQ ID NO: 4466 - DNA, 24 bp, Artificial Sequence
  Description of Artificial Sequence:  Hypothetical Probe Sequence
agccgcaacgaaggtaatcgtcgt

SEQ ID NO: 4467 - DNA, 24 bp, Artificial Sequence
  Description of Artificial Sequence:  Hypothetical Probe Sequence
agccgcaagcttgagtcacgctca

SEQ ID NO: 4468 - DNA, 24 bp, Artificial Sequence
  Description of Artificial Sequence:  Hypothetical Probe Sequence
agccgcaagcaatccccttgaatc

SEQ ID NO: 4469 - DNA, 24 bp, Artificial Sequence
  Description of Artificial Sequence:  Hypothetical Probe Sequence
agccgcaaatcggcaaacctctgt

SEQ ID NO: 4470 - DNA, 24 bp, Artificial Sequence
  Description of Artificial Sequence:  Hypothetical Probe Sequence
agccgcaaaggagcaacgttgagt

SEQ ID NO: 4471 - DNA, 24 bp, Artificial Sequence
  Description of Artificial Sequence:  Hypothetical Probe Sequence
agccgcaatcccggtaagtgcagc

SEQ ID NO: 4472 - DNA, 24 bp, Artificial Sequence
  Description of Artificial Sequence:  Hypothetical Probe Sequence
agccgcaatgcgatcgctcattga

SEQ ID NO: 4473 - DNA, 24 bp, Artificial Sequence
  Description of Artificial Sequence:  Hypothetical Probe Sequence
agccgcaacacgctgtgtgctccc

SEQ ID NO: 4474 - DNA, 24 bp, Artificial Sequence
  Description of Artificial Sequence:  Hypothetical Probe Sequence
agccgcaagtgcatacacgggacc

SEQ ID NO: 4475 - DNA, 24 bp, Artificial Sequence
  Description of Artificial Sequence:  Hypothetical Probe Sequence
agccgcaaacggcctagcttggac

SEQ ID NO: 4476 - DNA, 24 bp, Artificial Sequence
  Description of Artificial Sequence:  Hypothetical Probe Sequence
agccgcaaagccctgtcttgacgg

SEQ ID NO: 4477 - DNA, 24 bp, Artificial Sequence
  Description of Artificial Sequence:  Hypothetical Probe Sequence
agccagtgtcgtatcgcacgagga

SEQ ID NO: 4478 - DNA, 24 bp, Artificial Sequence
  Description of Artificial Sequence:  Hypothetical Probe Sequence
agccagtgcttgagtgggacgacc

SEQ ID NO: 4479 - DNA, 24 bp, Artificial Sequence
  Description of Artificial Sequence:  Hypothetical Probe Sequence
agccagtgctgtgatgacggagcc

SEQ ID NO: 4480 - DNA, 24 bp, Artificial Sequence
  Description of Artificial Sequence:  Hypothetical Probe Sequence
agccagtgggtacagcagccagcc

SEQ ID NO: 4481 - DNA, 24 bp, Artificial Sequence
  Description of Artificial Sequence:  Hypothetical Probe Sequence
agccagtgacctgctttcccgtct

SEQ ID NO: 4482 - DNA, 24 bp, Artificial Sequence
  Description of Artificial Sequence:  Hypothetical Probe Sequence
agccagtgatcggagtacggcagc

SEQ ID NO: 4483 - DNA, 24 bp, Artificial Sequence
  Description of Artificial Sequence:  Hypothetical Probe Sequence
agccagtgtgcgataccacgctca

SEQ ID NO: 4484 - DNA, 24 bp, Artificial Sequence
  Description of Artificial Sequence:  Hypothetical Probe Sequence
agccagtggaccaggagcaacacg

SEQ ID NO: 4485 - DNA, 24 bp, Artificial Sequence
  Description of Artificial Sequence:  Hypothetical Probe Sequence
agccaccttgtcaggacacggcaa

SEQ ID NO: 4486 - DNA, 24 bp, Artificial Sequence
  Description of Artificial Sequence:  Hypothetical Probe Sequence
agccaccttcgtaaagccatcgaa

SEQ ID NO: 4487 - DNA, 24 bp, Artificial Sequence
  Description of Artificial Sequence:  Hypothetical Probe Sequence
agccacctcgaatgtccttgcgaa

SEQ ID NO: 4488 - DNA, 24 bp, Artificial Sequence
  Description of Artificial Sequence:  Hypothetical Probe Sequence
agccacctatcgacctgatggcaa

SEQ ID NO: 4489 - DNA, 24 bp, Artificial Sequence
  Description of Artificial Sequence:  Hypothetical Probe Sequence
agccacctaggaagtgctcatgcg

SEQ ID NO: 4490 - DNA, 24 bp, Artificial Sequence
  Description of Artificial Sequence:  Hypothetical Probe Sequence
agccacctcacgaatctcccagga

SEQ ID NO: 4491 - DNA, 24 bp, Artificial Sequence
  Description of Artificial Sequence:  Hypothetical Probe Sequence
agccatcgcgaattgaggacccta

SEQ ID NO: 4492 - DNA, 24 bp, Artificial Sequence
  Description of Artificial Sequence:  Hypothetical Probe Sequence
agccatcggcaaaatccagcaatc

SEQ ID NO: 4493 - DNA, 24 bp, Artificial Sequence
  Description of Artificial Sequence:  Hypothetical Probe Sequence
agccatcgcctaatacccattccc

SEQ ID NO: 4494 - DNA, 24 bp, Artificial Sequence
  Description of Artificial Sequence:  Hypothetical Probe Sequence
agccaggaatacggtatccctgcg

SEQ ID NO: 4495 - DNA, 24 bp, Artificial Sequence
  Description of Artificial Sequence:  Hypothetical Probe Sequence
agccaggaaaagttgacacgtgcg

SEQ ID NO: 4496 - DNA, 24 bp, Artificial Sequence
  Description of Artificial Sequence:  Hypothetical Probe Sequence
agccaggatacatgcgctcacacg

SEQ ID NO: 4497 - DNA, 24 bp, Artificial Sequence
  Description of Artificial Sequence:  Hypothetical Probe Sequence
agccaggatctgcacgctgtgctt

SEQ ID NO: 4498 - DNA, 24 bp, Artificial Sequence
  Description of Artificial Sequence:  Hypothetical Probe Sequence
agccaggacgtttgtctcccggta

SEQ ID NO: 4499 - DNA, 24 bp, Artificial Sequence
  Description of Artificial Sequence:  Hypothetical Probe Sequence
agccaggactcaagccgagtccat

SEQ ID NO: 4500 - DNA, 24 bp, Artificial Sequence
  Description of Artificial Sequence:  Hypothetical Probe Sequence
agccaggaccatttgagtgccagc

SEQ ID NO: 4501 - DNA, 24 bp, Artificial Sequence
  Description of Artificial Sequence:  Hypothetical Probe Sequence
agccaggagcaaatacgatgccat

SEQ ID NO: 4502 - DNA, 24 bp, Artificial Sequence
  Description of Artificial Sequence:  Hypothetical Probe Sequence
agccaggatgcgcgaaggtagtgc

SEQ ID NO: 4503 - DNA, 24 bp, Artificial Sequence
  Description of Artificial Sequence:  Hypothetical Probe Sequence
agccaggacagccttgaatcacgg

SEQ ID NO: 4504 - DNA, 24 bp, Artificial Sequence
  Description of Artificial Sequence:  Hypothetical Probe Sequence
agccaggagacctcgtctcatccc

SEQ ID NO: 4505 - DNA, 24 bp, Artificial Sequence
  Description of Artificial Sequence:  Hypothetical Probe Sequence
agccaggaggacaaaggtgctccc

SEQ ID NO: 4506 - DNA, 24 bp, Artificial Sequence
  Description of Artificial Sequence:  Hypothetical Probe Sequence
agccaggaacggccataatcgcaa

SEQ ID NO: 4507 - DNA, 24 bp, Artificial Sequence
  Description of Artificial Sequence:  Hypothetical Probe Sequence
agcccctatgatagccgatgcttg

SEQ ID NO: 4508 - DNA, 24 bp, Artificial Sequence
  Description of Artificial Sequence:  Hypothetical Probe Sequence
agcccctatgtcagcccacgctgt

SEQ ID NO: 4509 - DNA, 24 bp, Artificial Sequence
  Description of Artificial Sequence:  Hypothetical Probe Sequence
agcccctacttgaggacagccagc

SEQ ID NO: 4510 - DNA, 24 bp, Artificial Sequence
  Description of Artificial Sequence:  Hypothetical Probe Sequence
agcccctactcactcaatcgcacg

SEQ ID NO: 4511 - DNA, 24 bp, Artificial Sequence
  Description of Artificial Sequence:  Hypothetical Probe Sequence
agcccctagagtgcaatgcgagga

SEQ ID NO: 4512 - DNA, 24 bp, Artificial Sequence
  Description of Artificial Sequence:  Hypothetical Probe Sequence
agcccctagcaaccatgtgcgagt

SEQ ID NO: 4513 - DNA, 24 bp, Artificial Sequence
  Description of Artificial Sequence:  Hypothetical Probe Sequence
agcccctaaccttctggcttagcc

SEQ ID NO: 4514 - DNA, 24 bp, Artificial Sequence
  Description of Artificial Sequence:  Hypothetical Probe Sequence
agcccctagatggcaatcgtgtgc

SEQ ID NO: 4515 - DNA, 24 bp, Artificial Sequence
  Description of Artificial Sequence:  Hypothetical Probe Sequence
agcccctacacgaatcaatcacgg

SEQ ID NO: 4516 - DNA, 24 bp, Artificial Sequence
  Description of Artificial Sequence:  Hypothetical Probe Sequence
agcccctaacggcacgctgttgtc

SEQ ID NO: 4517 - DNA, 24 bp, Artificial Sequence
  Description of Artificial Sequence:  Hypothetical Probe Sequence
agccgatgtgatcttgatcgcagc

SEQ ID NO: 4518 - DNA, 24 bp, Artificial Sequence
  Description of Artificial Sequence:  Hypothetical Probe Sequence
agccgatgttagttgatgcgctca

SEQ ID NO: 4519 - DNA, 24 bp, Artificial Sequence
  Description of Artificial Sequence:  Hypothetical Probe Sequence
agccgatgtacatgtcgacccacg

SEQ ID NO: 4520 - DNA, 24 bp, Artificial Sequence
  Description of Artificial Sequence:  Hypothetical Probe Sequence
agccgatgtctgaatcgcaaggac

SEQ ID NO: 4521 - DNA, 24 bp, Artificial Sequence
  Description of Artificial Sequence:  Hypothetical Probe Sequence
agccgatgtgtcagcctgcgggac

SEQ ID NO: 4522 - DNA, 24 bp, Artificial Sequence
  Description of Artificial Sequence:  Hypothetical Probe Sequence
agccgatgctcaacctgcttcacg

SEQ ID NO: 4523 - DNA, 24 bp, Artificial Sequence
  Description of Artificial Sequence:  Hypothetical Probe Sequence
agccgatggcttagccttagtgcg

SEQ ID NO: 4524 - DNA, 24 bp, Artificial Sequence
  Description of Artificial Sequence:  Hypothetical Probe Sequence
agccgatgacctcagccctagacc

SEQ ID NO: 4525 - DNA, 24 bp, Artificial Sequence
  Description of Artificial Sequence:  Hypothetical Probe Sequence
agccgatgcctaccatgtgcgtct

SEQ ID NO: 4526 - DNA, 24 bp, Artificial Sequence
  Description of Artificial Sequence:  Hypothetical Probe Sequence
agcctcccttgaaccttcccagga

SEQ ID NO: 4527 - DNA, 24 bp, Artificial Sequence
  Description of Artificial Sequence:  Hypothetical Probe Sequence
agcctcccatactgcgctcagctt

SEQ ID NO: 4528 - DNA, 24 bp, Artificial Sequence
  Description of Artificial Sequence:  Hypothetical Probe Sequence
agcctccctacaaccttgcggatg

SEQ ID NO: 4529 - DNA, 24 bp, Artificial Sequence
  Description of Artificial Sequence:  Hypothetical Probe Sequence
agcctccctgtcaaaggtgcgagt

SEQ ID NO: 4530 - DNA, 24 bp, Artificial Sequence
  Description of Artificial Sequence:  Hypothetical Probe Sequence
agcctccctcgtacggggtagagt

SEQ ID NO: 4531 - DNA, 24 bp, Artificial Sequence
  Description of Artificial Sequence:  Hypothetical Probe Sequence
agcctccccttgttgaagtgacgg

SEQ ID NO: 4532 - DNA, 24 bp, Artificial Sequence
  Description of Artificial Sequence:  Hypothetical Probe Sequence
agcctcccccatcctaggacctgt

SEQ ID NO: 4533 - DNA, 24 bp, Artificial Sequence
  Description of Artificial Sequence:  Hypothetical Probe Sequence
agcctccccgaatctggtgcctgt

SEQ ID NO: 4534 - DNA, 24 bp, Artificial Sequence
  Description of Artificial Sequence:  Hypothetical Probe Sequence
agcctcccgtctggtaggacgctt

SEQ ID NO: 4535 - DNA, 24 bp, Artificial Sequence
  Description of Artificial Sequence:  Hypothetical Probe Sequence
agcctcccgagtcctatcccgagt

SEQ ID NO: 4536 - DNA, 24 bp, Artificial Sequence
  Description of Artificial Sequence:  Hypothetical Probe Sequence
agcctcccagtgcttgcttggacc

SEQ ID NO: 4537 - DNA, 24 bp, Artificial Sequence
  Description of Artificial Sequence:  Hypothetical Probe Sequence
agcctcccatcgttgaaatcggac

SEQ ID NO: 4538 - DNA, 24 bp, Artificial Sequence
  Description of Artificial Sequence:  Hypothetical Probe Sequence
agcctcccaggacctatcgtcgaa

SEQ ID NO: 4539 - DNA, 24 bp, Artificial Sequence
  Description of Artificial Sequence:  Hypothetical Probe Sequence
agcctccccctactgtctcatccc

SEQ ID NO: 4540 - DNA, 24 bp, Artificial Sequence
  Description of Artificial Sequence:  Hypothetical Probe Sequence
agcctcccgatggatggcaatgat

SEQ ID NO: 4541 - DNA, 24 bp, Artificial Sequence
  Description of Artificial Sequence:  Hypothetical Probe Sequence
agcctccctcccgcaaacctgatg

SEQ ID NO: 4542 - DNA, 24 bp, Artificial Sequence
  Description of Artificial Sequence:  Hypothetical Probe Sequence
agcctcccgtgcatcgttgacagc

SEQ ID NO: 4543 - DNA, 24 bp, Artificial Sequence
  Description of Artificial Sequence:  Hypothetical Probe Sequence
agcctcccacggccatgagtcgaa

SEQ ID NO: 4544 - DNA, 24 bp, Artificial Sequence
  Description of Artificial Sequence:  Hypothetical Probe Sequence
agcctcccagccaaagtcgttcgt

SEQ ID NO: 4545 - DNA, 24 bp, Artificial Sequence
  Description of Artificial Sequence:  Hypothetical Probe Sequence
agcctgcgaatcggtaagtgcgtt

SEQ ID NO: 4546 - DNA, 24 bp, Artificial Sequence
  Description of Artificial Sequence:  Hypothetical Probe Sequence
agcctgcgaaagtctgtcccccta

SEQ ID NO: 4547 - DNA, 24 bp, Artificial Sequence
  Description of Artificial Sequence:  Hypothetical Probe Sequence
agcctgcgctcacttggcaagcaa

SEQ ID NO: 4548 - DNA, 24 bp, Artificial Sequence
  Description of Artificial Sequence:  Hypothetical Probe Sequence
agcctgcgctgtgtcttgtccgaa

SEQ ID NO: 4549 - DNA, 24 bp, Artificial Sequence
  Description of Artificial Sequence:  Hypothetical Probe Sequence
agcctgcggagtgatgctgtgctt

SEQ ID NO: 4550 - DNA, 24 bp, Artificial Sequence
  Description of Artificial Sequence:  Hypothetical Probe Sequence
agcctgcgagtggagttcccatcg

SEQ ID NO: 4551 - DNA, 24 bp, Artificial Sequence
  Description of Artificial Sequence:  Hypothetical Probe Sequence
agcctgcgaggagcttcctatccc

SEQ ID NO: 4552 - DNA, 24 bp, Artificial Sequence
  Description of Artificial Sequence:  Hypothetical Probe Sequence
agcctgcgtgcgaaagcctatcgt

SEQ ID NO: 4553 - DNA, 24 bp, Artificial Sequence
  Description of Artificial Sequence:  Hypothetical Probe Sequence
agcctgcgcacgctcatctgcagc

SEQ ID NO: 4554 - DNA, 24 bp, Artificial Sequence
  Description of Artificial Sequence:  Hypothetical Probe Sequence
agcctgcggtgcgatgagccttga

SEQ ID NO: 4555 - DNA, 24 bp, Artificial Sequence
  Description of Artificial Sequence:  Hypothetical Probe Sequence
agcccacgaatcgaccggtacacg

SEQ ID NO: 4556 - DNA, 24 bp, Artificial Sequence
  Description of Artificial Sequence:  Hypothetical Probe Sequence
agcccacgtacactcaatcgtgcg

SEQ ID NO: 4557 - DNA, 24 bp, Artificial Sequence
  Description of Artificial Sequence:  Hypothetical Probe Sequence
agcccacgcttggcaaggtatcgt

SEQ ID NO: 4558 - DNA, 24 bp, Artificial Sequence
  Description of Artificial Sequence:  Hypothetical Probe Sequence
agcccacggtctaggaggtaacgg

SEQ ID NO: 4559 - DNA, 24 bp, Artificial Sequence
  Description of Artificial Sequence:  Hypothetical Probe Sequence
agcccacgaccttcccctcatgtc

SEQ ID NO: 4560 - DNA, 24 bp, Artificial Sequence
  Description of Artificial Sequence:  Hypothetical Probe Sequence
agcccacgcctacgttgcttttga

SEQ ID NO: 4561 - DNA, 24 bp, Artificial Sequence
  Description of Artificial Sequence:  Hypothetical Probe Sequence
agcccacgcagcggacttgagcaa

SEQ ID NO: 4562 - DNA, 24 bp, Artificial Sequence
  Description of Artificial Sequence:  Hypothetical Probe Sequence
agcccacggaccgcttgcaactgt

SEQ ID NO: 4563 - DNA, 24 bp, Artificial Sequence
  Description of Artificial Sequence:  Hypothetical Probe Sequence
agcccacgacggctcaaggagcaa

SEQ ID NO: 4564 - DNA, 24 bp, Artificial Sequence
  Description of Artificial Sequence:  Hypothetical Probe Sequence
agcccagctgatcctagaccgcaa

SEQ ID NO: 4565 - DNA, 24 bp, Artificial Sequence
  Description of Artificial Sequence:  Hypothetical Probe Sequence
agcccagcttagagtgcagccgaa

SEQ ID NO: 4566 - DNA, 24 bp, Artificial Sequence
  Description of Artificial Sequence:  Hypothetical Probe Sequence
agcccagcaaaggaccagtgacgg

SEQ ID NO: 4567 - DNA, 24 bp, Artificial Sequence
  Description of Artificial Sequence:  Hypothetical Probe Sequence
agcccagctacagatgtccccacg

SEQ ID NO: 4568 - DNA, 24 bp, Artificial Sequence
  Description of Artificial Sequence:  Hypothetical Probe Sequence
agcccagctcgtgcttgcttggta

SEQ ID NO: 4569 - DNA, 24 bp, Artificial Sequence
  Description of Artificial Sequence:  Hypothetical Probe Sequence
agcccagcccatttgaaggagtgc

SEQ ID NO: 4570 - DNA, 24 bp, Artificial Sequence
  Description of Artificial Sequence:  Hypothetical Probe Sequence
agcccagcgcttacctatcgctca

SEQ ID NO: 4571 - DNA, 24 bp, Artificial Sequence
  Description of Artificial Sequence:  Hypothetical Probe Sequence
agcccagcgtctataccagctccc

SEQ ID NO: 4572 - DNA, 24 bp, Artificial Sequence
  Description of Artificial Sequence:  Hypothetical Probe Sequence
agcccagcaggactgttcccctca

SEQ ID NO: 4573 - DNA, 24 bp, Artificial Sequence
  Description of Artificial Sequence:  Hypothetical Probe Sequence
agcccagcgaccctcaacctcacg

SEQ ID NO: 4574 - DNA, 24 bp, Artificial Sequence
  Description of Artificial Sequence:  Hypothetical Probe Sequence
agcccagcagccccatcctaccat

SEQ ID NO: 4575 - DNA, 24 bp, Artificial Sequence
  Description of Artificial Sequence:  Hypothetical Probe Sequence
agccgaccttgaggtacgaaatcg

SEQ ID NO: 4576 - DNA, 24 bp, Artificial Sequence
  Description of Artificial Sequence:  Hypothetical Probe Sequence
agccgacctgatggacgcaactca

SEQ ID NO: 4577 - DNA, 24 bp, Artificial Sequence
  Description of Artificial Sequence:  Hypothetical Probe Sequence
agccgaccaaagcagctccctgtc

SEQ ID NO: 4578 - DNA, 24 bp, Artificial Sequence
  Description of Artificial Sequence:  Hypothetical Probe Sequence
agccgacccttgaaagctgtcgtt

SEQ ID NO: 4579 - DNA, 24 bp, Artificial Sequence
  Description of Artificial Sequence:  Hypothetical Probe Sequence
agccgaccctcacctaggaccttg

SEQ ID NO: 4580 - DNA, 24 bp, Artificial Sequence
  Description of Artificial Sequence:  Hypothetical Probe Sequence
agccgaccgtctgatgtcccatcg

SEQ ID NO: 4581 - DNA, 24 bp, Artificial Sequence
  Description of Artificial Sequence:  Hypothetical Probe Sequence
agccgaccgcaactcaaatccagc

SEQ ID NO: 4582 - DNA, 24 bp, Artificial Sequence
  Description of Artificial Sequence:  Hypothetical Probe Sequence
agccgaccagtgttaggtgcccta

SEQ ID NO: 4583 - DNA, 24 bp, Artificial Sequence
  Description of Artificial Sequence:  Hypothetical Probe Sequence
agccgaccatcgtctggcaaccat

SEQ ID NO: 4584 - DNA, 24 bp, Artificial Sequence
  Description of Artificial Sequence:  Hypothetical Probe Sequence
agccgaccaggaagtgcgttatcg

SEQ ID NO: 4585 - DNA, 24 bp, Artificial Sequence
  Description of Artificial Sequence:  Hypothetical Probe Sequence
agccgacccacgagtgctgtcacg

SEQ ID NO: 4586 - DNA, 24 bp, Artificial Sequence
  Description of Artificial Sequence:  Hypothetical Probe Sequence
agccgaccgtgcatcgaaagatcg

SEQ ID NO: 4587 - DNA, 24 bp, Artificial Sequence
  Description of Artificial Sequence:  Hypothetical Probe Sequence
agccgtgcaatctcgttccctgat

SEQ ID NO: 4588 - DNA, 24 bp, Artificial Sequence
  Description of Artificial Sequence:  Hypothetical Probe Sequence
agccgtgcataccctacagcacgg

SEQ ID NO: 4589 - DNA, 24 bp, Artificial Sequence
  Description of Artificial Sequence:  Hypothetical Probe Sequence
agccgtgctctgagtgccatgatg

SEQ ID NO: 4590 - DNA, 24 bp, Artificial Sequence
  Description of Artificial Sequence:  Hypothetical Probe Sequence
agccgtgctcgttcgtgtctagcc

SEQ ID NO: 4591 - DNA, 24 bp, Artificial Sequence
  Description of Artificial Sequence:  Hypothetical Probe Sequence
agccgtgccttggagtgcaaacct

SEQ ID NO: 4592 - DNA, 24 bp, Artificial Sequence
  Description of Artificial Sequence:  Hypothetical Probe Sequence
agccgtgccgaagcaatgtcagga

SEQ ID NO: 4593 - DNA, 24 bp, Artificial Sequence
  Description of Artificial Sequence:  Hypothetical Probe Sequence
agccgtgcgcttgtgctcgtggta

SEQ ID NO: 4594 - DNA, 24 bp, Artificial Sequence
  Description of Artificial Sequence:  Hypothetical Probe Sequence
agccgtgcgtctgctttccctgtc

SEQ ID NO: 4595 - DNA, 24 bp, Artificial Sequence
  Description of Artificial Sequence:  Hypothetical Probe Sequence
agccgtgcatcggcaactgtcacg

SEQ ID NO: 4596 - DNA, 24 bp, Artificial Sequence
  Description of Artificial Sequence:  Hypothetical Probe Sequence
agccgtgcggaccttgtcgtcagc

SEQ ID NO: 4597 - DNA, 24 bp, Artificial Sequence
  Description of Artificial Sequence:  Hypothetical Probe Sequence
agccggacttagtacaagcctgcg

SEQ ID NO: 4598 - DNA, 24 bp, Artificial Sequence
  Description of Artificial Sequence:  Hypothetical Probe Sequence
agccggactgtctcgtggtaatcg

SEQ ID NO: 4599 - DNA, 24 bp, Artificial Sequence
  Description of Artificial Sequence:  Hypothetical Probe Sequence
agccggaccgtttgtcgaccttga

SEQ ID NO: 4600 - DNA, 24 bp, Artificial Sequence
  Description of Artificial Sequence:  Hypothetical Probe Sequence
agccggacccatcagcgagttgtc

SEQ ID NO: 4601 - DNA, 24 bp, Artificial Sequence
  Description of Artificial Sequence:  Hypothetical Probe Sequence
agccggacgcttcttgctcacgtt

SEQ ID NO: 4602 - DNA, 24 bp, Artificial Sequence
  Description of Artificial Sequence:  Hypothetical Probe Sequence
agccggacacctcttgaccttcgt

SEQ ID NO: 4603 - DNA, 24 bp, Artificial Sequence
  Description of Artificial Sequence:  Hypothetical Probe Sequence
agccggacatcgcgtttctgacct

SEQ ID NO: 4604 - DNA, 24 bp, Artificial Sequence
  Description of Artificial Sequence:  Hypothetical Probe Sequence
agccggacaggacctacagcaatc

SEQ ID NO: 4605 - DNA, 24 bp, Artificial Sequence
  Description of Artificial Sequence:  Hypothetical Probe Sequence
agccggactccctacacacgggac

SEQ ID NO: 4606 - DNA, 24 bp, Artificial Sequence
  Description of Artificial Sequence:  Hypothetical Probe Sequence
agccggacgtgcgagtgaccggta

SEQ ID NO: 4607 - DNA, 24 bp, Artificial Sequence
  Description of Artificial Sequence:  Hypothetical Probe Sequence
agccggacggacgacccagcttag

SEQ ID NO: 4608 - DNA, 24 bp, Artificial Sequence
  Description of Artificial Sequence:  Hypothetical Probe Sequence
agccacggaatctgatgcttcacg

SEQ ID NO: 4609 - DNA, 24 bp, Artificial Sequence
  Description of Artificial Sequence:  Hypothetical Probe Sequence
agccacggataccagctcgtacgg

SEQ ID NO: 4610 - DNA, 24 bp, Artificial Sequence
  Description of Artificial Sequence:  Hypothetical Probe Sequence
agccacggaaagaaaggatggtgc

SEQ ID NO: 4611 - DNA, 24 bp, Artificial Sequence
  Description of Artificial Sequence:  Hypothetical Probe Sequence
agccacggtacacctatcccgatg

SEQ ID NO: 4612 - DNA, 24 bp, Artificial Sequence
  Description of Artificial Sequence:  Hypothetical Probe Sequence
agccacggtctggatgcgttttga

SEQ ID NO: 4613 - DNA, 24 bp, Artificial Sequence
  Description of Artificial Sequence:  Hypothetical Probe Sequence
agccacggtgtcggacatcgcttg

SEQ ID NO: 4614 - DNA, 24 bp, Artificial Sequence
  Description of Artificial Sequence:  Hypothetical Probe Sequence
agccacgggcttgcttcacgacct

SEQ ID NO: 4615 - DNA, 24 bp, Artificial Sequence
  Description of Artificial Sequence:  Hypothetical Probe Sequence
agccacgggtctgtctgtgccacg

SEQ ID NO: 4616 - DNA, 24 bp, Artificial Sequence
  Description of Artificial Sequence:  Hypothetical Probe Sequence
agccacggatcggctttcgtgagt

SEQ ID NO: 4617 - DNA, 24 bp, Artificial Sequence
  Description of Artificial Sequence:  Hypothetical Probe Sequence
agccacgggaccagtggaccctgt

SEQ ID NO: 4618 - DNA, 24 bp, Artificial Sequence
  Description of Artificial Sequence:  Hypothetical Probe Sequence
agccacgggtgctacaggacgtgc

SEQ ID NO: 4619 - DNA, 24 bp, Artificial Sequence
  Description of Artificial Sequence:  Hypothetical Probe Sequence
agccacggacggcctaagtgcgtt

SEQ ID NO: 4620 - DNA, 24 bp, Artificial Sequence
  Description of Artificial Sequence:  Hypothetical Probe Sequence
agccagcctgatacctagccatcg

SEQ ID NO: 4621 - DNA, 24 bp, Artificial Sequence
  Description of Artificial Sequence:  Hypothetical Probe Sequence
agccagccaaagacctacggctgt

SEQ ID NO: 4622 - DNA, 24 bp, Artificial Sequence
  Description of Artificial Sequence:  Hypothetical Probe Sequence
agccagcctctggaccaggatcgt

SEQ ID NO: 4623 - DNA, 24 bp, Artificial Sequence
  Description of Artificial Sequence:  Hypothetical Probe Sequence
agccagcctcgtagtgggtaacgg

SEQ ID NO: 4624 - DNA, 24 bp, Artificial Sequence
  Description of Artificial Sequence:  Hypothetical Probe Sequence
agccagcccttgtgtccgaacttg

SEQ ID NO: 4625 - DNA, 24 bp, Artificial Sequence
  Description of Artificial Sequence:  Hypothetical Probe Sequence
agccagcccgttcgtttcgttaca

SEQ ID NO: 4626 - DNA, 24 bp, Artificial Sequence
  Description of Artificial Sequence:  Hypothetical Probe Sequence
agccagccctcagcttcttgggta

SEQ ID NO: 4627 - DNA, 24 bp, Artificial Sequence
  Description of Artificial Sequence:  Hypothetical Probe Sequence
agccagccgcttagtgcagcagtg

SEQ ID NO: 4628 - DNA, 24 bp, Artificial Sequence
  Description of Artificial Sequence:  Hypothetical Probe Sequence
agccagccgtctttgaggaccttg

SEQ ID NO: 4629 - DNA, 24 bp, Artificial Sequence
  Description of Artificial Sequence:  Hypothetical Probe Sequence
agccagccatcgtgatgatgagcc

SEQ ID NO: 4630 - DNA, 24 bp, Artificial Sequence
  Description of Artificial Sequence:  Hypothetical Probe Sequence
agccagcctccccagcgatgtgat

SEQ ID NO: 4631 - DNA, 24 bp, Artificial Sequence
  Description of Artificial Sequence:  Hypothetical Probe Sequence
agccagcccacgccatgcaactgt

SEQ ID NO: 4632 - DNA, 24 bp, Artificial Sequence
  Description of Artificial Sequence:  Hypothetical Probe Sequence
agccagccgacccagcaggagatg

SEQ ID NO: 4633 - DNA, 24 bp, Artificial Sequence
  Description of Artificial Sequence:  Hypothetical Probe Sequence
agccagccggacggtaatcggtct

SEQ ID NO: 4634 - DNA, 20 bp, Artificial Sequence
  Description of Artificial Sequence:  Hypothetical Probe Sequence
aatccagcgcaaaatctgcg

SEQ ID NO: 4635 - DNA, 20 bp, Artificial Sequence
  Description of Artificial Sequence:  Hypothetical Probe Sequence
aaagcctacacgacggcgaa

SEQ ID NO: 4636 - DNA, 20 bp, Artificial Sequence
  Description of Artificial Sequence:  Hypothetical Probe Sequence
tctgccatacgggcttacgg

SEQ ID NO: 4637 - DNA, 20 bp, Artificial Sequence
  Description of Artificial Sequence:  Hypothetical Probe Sequence
cttgtccccagcacggccat

SEQ ID NO: 4638 - DNA, 20 bp, Artificial Sequence
  Description of Artificial Sequence:  Hypothetical Probe Sequence
cgttgaccagcccgttgcaa

SEQ ID NO: 4639 - DNA, 20 bp, Artificial Sequence
  Description of Artificial Sequence:  Hypothetical Probe Sequence
cgaagctttcccccatgatg

SEQ ID NO: 4640 - DNA, 20 bp, Artificial Sequence
  Description of Artificial Sequence:  Hypothetical Probe Sequence
gcaaggacgaccgcaaacgg

SEQ ID NO: 4641 - DNA, 20 bp, Artificial Sequence
  Description of Artificial Sequence:  Hypothetical Probe Sequence
gatgacggacggtgcggcaa

SEQ ID NO: 4642 - DNA, 20 bp, Artificial Sequence
  Description of Artificial Sequence:  Hypothetical Probe Sequence
tcccatcgaaagggacgatg

SEQ ID NO: 4643 - DNA, 20 bp, Artificial Sequence
  Description of Artificial Sequence:  Hypothetical Probe Sequence
tgcgtctgggacgtgccttg

SEQ ID NO: 4644 - DNA, 20 bp, Artificial Sequence
  Description of Artificial Sequence:  Hypothetical Probe Sequence
cacgtcgtcagctcccgtgc

SEQ ID NO: 4645 - DNA, 20 bp, Artificial Sequence
  Description of Artificial Sequence:  Hypothetical Probe Sequence
cagcctgttgcggtgcgtct

SEQ ID NO: 4646 - DNA, 20 bp, Artificial Sequence
  Description of Artificial Sequence:  Hypothetical Probe Sequence
gtgcggtacttgcagcgatg

SEQ ID NO: 4647 - DNA, 20 bp, Artificial Sequence
  Description of Artificial Sequence:  Hypothetical Probe Sequence
acggtctgcacgtcccagcc

SEQ ID NO: 4648 - DNA, 20 bp, Artificial Sequence
  Description of Artificial Sequence:  Hypothetical Probe Sequence
tctggtgcgtgccagccagc

SEQ ID NO: 4649 - DNA, 20 bp, Artificial Sequence
  Description of Artificial Sequence:  Hypothetical Probe Sequence
tgtcgctttctgacggagcc

SEQ ID NO: 4650 - DNA, 20 bp, Artificial Sequence
  Description of Artificial Sequence:  Hypothetical Probe Sequence
cgtttgcgggtatccctcgt

SEQ ID NO: 4651 - DNA, 20 bp, Artificial Sequence
  Description of Artificial Sequence:  Hypothetical Probe Sequence
cgaaaggacagcagcctccc

SEQ ID NO: 4652 - DNA, 20 bp, Artificial Sequence
  Description of Artificial Sequence:  Hypothetical Probe Sequence
gcaagcaacgaacacgctgt

SEQ ID NO: 4653 - DNA, 20 bp, Artificial Sequence
  Description of Artificial Sequence:  Hypothetical Probe Sequence
tgcgagtggaccatcgccat

SEQ ID NO: 4654 - DNA, 20 bp, Artificial Sequence
  Description of Artificial Sequence:  Hypothetical Probe Sequence
cacgcttgccatggacggac

SEQ ID NO: 4655 - DNA, 20 bp, Artificial Sequence
  Description of Artificial Sequence:  Hypothetical Probe Sequence
gtgcctcaacgggtgcagcc

SEQ ID NO: 4656 - DNA, 20 bp, Artificial Sequence
  Description of Artificial Sequence:  Hypothetical Probe Sequence
tgatggaccgttagccgatg

SEQ ID NO: 4657 - DNA, 20 bp, Artificial Sequence
  Description of Artificial Sequence:  Hypothetical Probe Sequence
acggaggaggactgcgtgcg

SEQ ID NO: 4658 - DNA, 20 bp, Artificial Sequence
  Description of Artificial Sequence:  Hypothetical Probe Sequence
gatgagccagcctgcgagcc

SEQ ID NO: 4659 - DNA, 20 bp, Artificial Sequence
  Description of Artificial Sequence:  Hypothetical Probe Sequence
tcgtcgtttcccctcatgcg

SEQ ID NO: 4660 - DNA, 20 bp, Artificial Sequence
  Description of Artificial Sequence:  Hypothetical Probe Sequence
gcaactgtcgttcacggtgc

SEQ ID NO: 4661 - DNA, 20 bp, Artificial Sequence
  Description of Artificial Sequence:  Hypothetical Probe Sequence
aggacacgcagcgacctgcg

SEQ ID NO: 4662 - DNA, 20 bp, Artificial Sequence
  Description of Artificial Sequence:  Hypothetical Probe Sequence
gaccctgtgtctgctttgcg

SEQ ID NO: 4663 - DNA, 20 bp, Artificial Sequence
  Description of Artificial Sequence:  Hypothetical Probe Sequence
agccaaagcgaagtgcgatg

SEQ ID NO: 4664 - DNA, 20 bp, Artificial Sequence
  Description of Artificial Sequence:  Hypothetical Probe Sequence
gacctcgtgagttcccgcaa

SEQ ID NO: 4665 - DNA, 20 bp, Artificial Sequence
  Description of Artificial Sequence:  Hypothetical Probe Sequence
cttgacctatcgagccgtgc

SEQ ID NO: 4666 - DNA, 20 bp, Artificial Sequence
  Description of Artificial Sequence:  Hypothetical Probe Sequence
agccgcttgagtcgaaatcg

SEQ ID NO: 4667 - DNA, 20 bp, Artificial Sequence
  Description of Artificial Sequence:  Hypothetical Probe Sequence
cttgctcacctaccattgcg

SEQ ID NO: 4668 - DNA, 20 bp, Artificial Sequence
  Description of Artificial Sequence:  Hypothetical Probe Sequence
atcgcctaggtaacggggac

SEQ ID NO: 4669 - DNA, 20 bp, Artificial Sequence
  Description of Artificial Sequence:  Hypothetical Probe Sequence
cagcggtactgtggacccat

SEQ ID NO: 4670 - DNA, 20 bp, Artificial Sequence
  Description of Artificial Sequence:  Hypothetical Probe Sequence
agccacctaatctcccacgg

SEQ ID NO: 4671 - DNA, 20 bp, Artificial Sequence
  Description of Artificial Sequence:  Hypothetical Probe Sequence
tcgttcccacctccattccc

SEQ ID NO: 4672 - DNA, 20 bp, Artificial Sequence
  Description of Artificial Sequence:  Hypothetical Probe Sequence
atcgcagcgagtcagccacg

SEQ ID NO: 4673 - DNA, 20 bp, Artificial Sequence
  Description of Artificial Sequence:  Hypothetical Probe Sequence
cctaacctgatggtgcgcaa

SEQ ID NO: 4674 - DNA, 20 bp, Artificial Sequence
  Description of Artificial Sequence:  Hypothetical Probe Sequence
tgcggtctccatatcggtgc

SEQ ID NO: 4675 - DNA, 20 bp, Artificial Sequence
  Description of Artificial Sequence:  Hypothetical Probe Sequence
cacgcgttaccttgtcgatg

SEQ ID NO: 4676 - DNA, 20 bp, Artificial Sequence
  Description of Artificial Sequence:  Hypothetical Probe Sequence
tgtcgtgctctgaccttgcg

SEQ ID NO: 4677 - DNA, 20 bp, Artificial Sequence
  Description of Artificial Sequence:  Hypothetical Probe Sequence
acggaatcgtgctgcggctt

SEQ ID NO: 4678 - DNA, 20 bp, Artificial Sequence
  Description of Artificial Sequence:  Hypothetical Probe Sequence
tcgttctggcttggacgctt

SEQ ID NO: 4679 - DNA, 20 bp, Artificial Sequence
  Description of Artificial Sequence:  Hypothetical Probe Sequence
tcgttgcgtgtcggaccttg

SEQ ID NO: 4680 - DNA, 20 bp, Artificial Sequence
  Description of Artificial Sequence:  Hypothetical Probe Sequence
cgttgatgcgaatcgtcgaa

SEQ ID NO: 4681 - DNA, 20 bp, Artificial Sequence
  Description of Artificial Sequence:  Hypothetical Probe Sequence
cacgctcaaccttccccgtt

SEQ ID NO: 4682 - DNA, 20 bp, Artificial Sequence
  Description of Artificial Sequence:  Hypothetical Probe Sequence
ctgtgtgccgtttcgtgtgc

SEQ ID NO: 4683 - DNA, 20 bp, Artificial Sequence
  Description of Artificial Sequence:  Hypothetical Probe Sequence
ccatgcaatcccaggatgtc

SEQ ID NO: 4684 - DNA, 20 bp, Artificial Sequence
  Description of Artificial Sequence:  Hypothetical Probe Sequence
ccatcagctctggcaatgcg

SEQ ID NO: 4685 - DNA, 20 bp, Artificial Sequence
  Description of Artificial Sequence:  Hypothetical Probe Sequence
tctgggtaaggaagccatcg

SEQ ID NO: 4686 - DNA, 20 bp, Artificial Sequence
  Description of Artificial Sequence:  Hypothetical Probe Sequence
tgtcctgtccatcgaatgcg

SEQ ID NO: 4687 - DNA, 20 bp, Artificial Sequence
  Description of Artificial Sequence:  Hypothetical Probe Sequence
cgaacgtttacatgcgtcgt

SEQ ID NO: 4688 - DNA, 20 bp, Artificial Sequence
  Description of Artificial Sequence:  Hypothetical Probe Sequence
agtgagccgcaacttgggac

SEQ ID NO: 4689 - DNA, 20 bp, Artificial Sequence
  Description of Artificial Sequence:  Hypothetical Probe Sequence
ggacagtgagtgtgcgcacg

SEQ ID NO: 4690 - DNA, 20 bp, Artificial Sequence
  Description of Artificial Sequence:  Hypothetical Probe Sequence
gcaaagccataccttggctt

SEQ ID NO: 4691 - DNA, 20 bp, Artificial Sequence
  Description of Artificial Sequence:  Hypothetical Probe Sequence
cttgcctacgaacagccgaa

SEQ ID NO: 4692 - DNA, 20 bp, Artificial Sequence
  Description of Artificial Sequence:  Hypothetical Probe Sequence
gcaagtgcccatgtgcccta

SEQ ID NO: 4693 - DNA, 20 bp, Artificial Sequence
  Description of Artificial Sequence:  Hypothetical Probe Sequence
tctggaccggactccccgaa

SEQ ID NO: 4694 - DNA, 20 bp, Artificial Sequence
  Description of Artificial Sequence:  Hypothetical Probe Sequence
acggcagctacacacgagcc

SEQ ID NO: 4695 - DNA, 20 bp, Artificial Sequence
  Description of Artificial Sequence:  Hypothetical Probe Sequence
gaccacctcagcgcttgacc

SEQ ID NO: 4696 - DNA, 20 bp, Artificial Sequence
  Description of Artificial Sequence:  Hypothetical Probe Sequence
tcccttaggacccagcgtct

SEQ ID NO: 4697 - DNA, 20 bp, Artificial Sequence
  Description of Artificial Sequence:  Hypothetical Probe Sequence
tgcgccataaaggaccttag

SEQ ID NO: 4698 - DNA, 20 bp, Artificial Sequence
  Description of Artificial Sequence:  Hypothetical Probe Sequence
tgcgaggaccatggtaggta

SEQ ID NO: 4699 - DNA, 20 bp, Artificial Sequence
  Description of Artificial Sequence:  Hypothetical Probe Sequence
tcgtggacacggcacgctca

SEQ ID NO: 4700 - DNA, 20 bp, Artificial Sequence
  Description of Artificial Sequence:  Hypothetical Probe Sequence
agtgcagccacgaaagcgaa

SEQ ID NO: 4701 - DNA, 20 bp, Artificial Sequence
  Description of Artificial Sequence:  Hypothetical Probe Sequence
atcggagttgcgcgttggac

SEQ ID NO: 4702 - DNA, 20 bp, Artificial Sequence
  Description of Artificial Sequence:  Hypothetical Probe Sequence
gatggcttcagctgcgcgaa

SEQ ID NO: 4703 - DNA, 20 bp, Artificial Sequence
  Description of Artificial Sequence:  Hypothetical Probe Sequence
tcccttgaacggtcccggac

SEQ ID NO: 4704 - DNA, 20 bp, Artificial Sequence
  Description of Artificial Sequence:  Hypothetical Probe Sequence
gcaattgatcccgaccgtgc

SEQ ID NO: 4705 - DNA, 20 bp, Artificial Sequence
  Description of Artificial Sequence:  Hypothetical Probe Sequence
tcccacgggatgcgttgacc

SEQ ID NO: 4706 - DNA, 20 bp, Artificial Sequence
  Description of Artificial Sequence:  Hypothetical Probe Sequence
ggacatcgagtgtccccagc

SEQ ID NO: 4707 - DNA, 20 bp, Artificial Sequence
  Description of Artificial Sequence:  Hypothetical Probe Sequence
tgcgcgttctgtgagttgcg

SEQ ID NO: 4708 - DNA, 20 bp, Artificial Sequence
  Description of Artificial Sequence:  Hypothetical Probe Sequence
gtctgcaatcgtcacgcagc

SEQ ID NO: 4709 - DNA, 20 bp, Artificial Sequence
  Description of Artificial Sequence:  Hypothetical Probe Sequence
agtgcacggcttctgttgcg

SEQ ID NO: 4710 - DNA, 20 bp, Artificial Sequence
  Description of Artificial Sequence:  Hypothetical Probe Sequence
ctcagcttgaccgcttcagc

SEQ ID NO: 4711 - DNA, 20 bp, Artificial Sequence
  Description of Artificial Sequence:  Hypothetical Probe Sequence
cagccctaatcgacctgtgc

SEQ ID NO: 4712 - DNA, 20 bp, Artificial Sequence
  Description of Artificial Sequence:  Hypothetical Probe Sequence
tcgtgtgcgcttaatcacgg

SEQ ID NO: 4713 - DNA, 20 bp, Artificial Sequence
  Description of Artificial Sequence:  Hypothetical Probe Sequence
cgaagtctcttgacggacgg

SEQ ID NO: 4714 - DNA, 20 bp, Artificial Sequence
  Description of Artificial Sequence:  Hypothetical Probe Sequence
cgtttcccaatcatcggcaa

SEQ ID NO: 4715 - DNA, 20 bp, Artificial Sequence
  Description of Artificial Sequence:  Hypothetical Probe Sequence
gtgctgatgcaaatcggctt

SEQ ID NO: 4716 - DNA, 20 bp, Artificial Sequence
  Description of Artificial Sequence:  Hypothetical Probe Sequence
cttggtgcgcaaaggatgcg

SEQ ID NO: 4717 - DNA, 20 bp, Artificial Sequence
  Description of Artificial Sequence:  Hypothetical Probe Sequence
tcgtttgagcaagacccacg

SEQ ID NO: 4718 - DNA, 20 bp, Artificial Sequence
  Description of Artificial Sequence:  Hypothetical Probe Sequence
cgaacagctgcgaatcgtct

SEQ ID NO: 4719 - DNA, 20 bp, Artificial Sequence
  Description of Artificial Sequence:  Hypothetical Probe Sequences sp.
tcgtgcttacggcttgagcc

SEQ ID NO: 4720 - DNA, 20 bp, Artificial Sequence
  Description of Artificial Sequence:  Hypothetical Probe Sequence
tcccgagtacctggacacgg

SEQ ID NO: 4721 - DNA, 20 bp, Artificial Sequence
  Description of Artificial Sequence:  Hypothetical Probe Sequence
tcccgctttgattctgtcgt

SEQ ID NO: 4722 - DNA, 20 bp, Artificial Sequence
  Description of Artificial Sequence:  Hypothetical Probe Sequence
tcccacctgtctacctagcc

SEQ ID NO: 4723 - DNA, 20 bp, Artificial Sequence
  Description of Artificial Sequence:  Hypothetical Probe Sequence
tccccacgatacacctttga

SEQ ID NO: 4724 - DNA, 20 bp, Artificial Sequence
  Description of Artificial Sequence:  Hypothetical Probe Sequence
tgcgcttgatactgtcgctt

SEQ ID NO: 4725 - DNA, 20 bp, Artificial Sequence
  Description of Artificial Sequence:  Hypothetical Probe Sequence
tgcgctcaatacagcctcgt

SEQ ID NO: 4726 - DNA, 20 bp, Artificial Sequence
  Description of Artificial Sequence:  Hypothetical Probe Sequence
tgcgatcgcgaagcaatgat

SEQ ID NO: 4727 - DNA, 20 bp, Artificial Sequence
  Description of Artificial Sequence:  Hypothetical Probe Sequence
tgcgtccctctgtgatcacg

SEQ ID NO: 4728 - DNA, 20 bp, Artificial Sequence
  Description of Artificial Sequence:  Hypothetical Probe Sequence
tgcgcacgaggaatcgcttg

SEQ ID NO: 4729 - DNA, 20 bp, Artificial Sequence
  Description of Artificial Sequence:  Hypothetical Probe Sequence
gtgctacagtgcaaagcacg

SEQ ID NO: 4730 - DNA, 20 bp, Artificial Sequence
  Description of Artificial Sequence:  Hypothetical Probe Sequence
aaagggacgtgcgcttcgaa

SEQ ID NO: 4731 - DNA, 20 bp, Artificial Sequence
  Description of Artificial Sequence:  Hypothetical Probe Sequence
tctgcacgcgttgtgcggta

SEQ ID NO: 4732 - DNA, 20 bp, Artificial Sequence
  Description of Artificial Sequence:  Hypothetical Probe Sequence
tgtcccattccccacgcgtt

SEQ ID NO: 4733 - DNA, 20 bp, Artificial Sequence
  Description of Artificial Sequence:  Hypothetical Probe Sequence
tcgtagccggtatgcgacgg

SEQ ID NO: 4734 - DNA, 20 bp, Artificial Sequence
  Description of Artificial Sequence:  Hypothetical Probe Sequence
ccatgcttcgaaacggcgaa

SEQ ID NO: 4735 - DNA, 20 bp, Artificial Sequence
  Description of Artificial Sequence:  Hypothetical Probe Sequence
cgaaatcggcaacctatgcg

SEQ ID NO: 4736 - DNA, 20 bp, Artificial Sequence
  Description of Artificial Sequence:  Hypothetical Probe Sequence
tcccggtattagagcccacg

SEQ ID NO: 4737 - DNA, 20 bp, Artificial Sequence
  Description of Artificial Sequence:  Hypothetical Probe Sequence
tgcgtgcgctcaatcgagga

SEQ ID NO: 4738 - DNA, 20 bp, Artificial Sequence
  Description of Artificial Sequence:  Hypothetical Probe Sequence
tgcgagccgatgccatcttg

SEQ ID NO: 4739 - DNA, 20 bp, Artificial Sequence
  Description of Artificial Sequence:  Hypothetical Probe Sequence
cagcacgggacccctacacg

SEQ ID NO: 4740 - DNA, 20 bp, Artificial Sequence
  Description of Artificial Sequence:  Hypothetical Probe Sequence
gtgctcccgcaacgttgtgc

SEQ ID NO: 4741 - DNA, 20 bp, Artificial Sequence
  Description of Artificial Sequence:  Hypothetical Probe Sequence
acgggcaaacctcttgcttg

SEQ ID NO: 4742 - DNA, 20 bp, Artificial Sequence
  Description of Artificial Sequence:  Hypothetical Probe Sequence
acgggatggcaaggacctca

SEQ ID NO: 4743 - DNA, 20 bp, Artificial Sequence
  Description of Artificial Sequence:  Hypothetical Probe Sequence
agcctgtccgtttgcgacgg

SEQ ID NO: 4744 - DNA, 20 bp, Artificial Sequence
  Description of Artificial Sequence:  Hypothetical Probe Sequence
agccaggatcccaaagccta

SEQ ID NO: 4745 - DNA, 20 bp, Artificial Sequence
  Description of Artificial Sequence:  Hypothetical Probe Sequence
tctgacggtcccgcttacgg

SEQ ID NO: 4746 - DNA, 20 bp, Artificial Sequence
  Description of Artificial Sequence:  Hypothetical Probe Sequence
tgtccacgtgcgggacacgg

SEQ ID NO: 4747 - DNA, 20 bp, Artificial Sequence
  Description of Artificial Sequence:  Hypothetical Probe Sequence
cgaagtgccacgcacgcgtt

SEQ ID NO: 4748 - DNA, 20 bp, Artificial Sequence
  Description of Artificial Sequence:  Hypothetical Probe Sequence
ggtaacggctcaagccgctt

SEQ ID NO: 4749 - DNA, 20 bp, Artificial Sequence
  Description of Artificial Sequence:  Hypothetical Probe Sequence
tgatgcaaagccgtgcagcc

SEQ ID NO: 4750 - DNA, 20 bp, Artificial Sequence
  Description of Artificial Sequence:  Hypothetical Probe Sequence
gatggtgcgcttagccgcaa

SEQ ID NO: 4751 - DNA, 20 bp, Artificial Sequence
  Description of Artificial Sequence:  Hypothetical Probe Sequence
tccctcccggtatcgtacgg

SEQ ID NO: 4752 - DNA, 20 bp, Artificial Sequence
  Description of Artificial Sequence:  Hypothetical Probe Sequence
tccccacggagtggaccagc

SEQ ID NO: 4753 - DNA, 20 bp, Artificial Sequence
  Description of Artificial Sequence:  Hypothetical Probe Sequence
cacgatcgggacgcaacacg

SEQ ID NO: 4754 - DNA, 20 bp, Artificial Sequence
  Description of Artificial Sequence:  Hypothetical Probe Sequence
cacgtcccttgagaccgcaa

SEQ ID NO: 4755 - DNA, 20 bp, Artificial Sequence
  Description of Artificial Sequence:  Hypothetical Probe Sequence
cagccacgggacagccagtg

SEQ ID NO: 4756 - DNA, 20 bp, Artificial Sequence
  Description of Artificial Sequence:  Hypothetical Probe Sequence
cagcggacttagtcccgtgc

SEQ ID NO: 4757 - DNA, 20 bp, Artificial Sequence
  Description of Artificial Sequence:  Hypothetical Probe Sequence
gacccgaatgattgtcgcaa

SEQ ID NO: 4758 - DNA, 20 bp, Artificial Sequence
  Description of Artificial Sequence:  Hypothetical Probe Sequence
gaccatcgagcccacgagga

SEQ ID NO: 4759 - DNA, 20 bp, Artificial Sequence
  Description of Artificial Sequence:  Hypothetical Probe Sequence
gtgccgaagagtcacgggac

SEQ ID NO: 4760 - DNA, 20 bp, Artificial Sequence
  Description of Artificial Sequence:  Hypothetical Probe Sequence
gtgcgtctacggagcctgcg

SEQ ID NO: 4761 - DNA, 20 bp, Artificial Sequence
  Description of Artificial Sequence:  Hypothetical Probe Sequence
gtgcgagtacggacggcgtt

SEQ ID NO: 4762 - DNA, 20 bp, Artificial Sequence
  Description of Artificial Sequence:  Hypothetical Probe Sequence
gtgctgcgaaagaggatccc

SEQ ID NO: 4763 - DNA, 20 bp, Artificial Sequence
  Description of Artificial Sequence:  Hypothetical Probe Sequence
ggacgacccgaaggaccttg

SEQ ID NO: 4764 - DNA, 20 bp, Artificial Sequence
  Description of Artificial Sequence:  Hypothetical Probe Sequence
ggacagccgcttgaccgatg

SEQ ID NO: 4765 - DNA, 20 bp, Artificial Sequence
  Description of Artificial Sequence:  Hypothetical Probe Sequence
gcaatgcgctgtcctaacgg

SEQ ID NO: 4766 - DNA, 20 bp, Artificial Sequence
  Description of Artificial Sequence:  Hypothetical Probe Sequence
atcgcacgtctgcttgccat

SEQ ID NO: 4767 - DNA, 20 bp, Artificial Sequence
  Description of Artificial Sequence:  Hypothetical Probe Sequence
cagcgcaatacaggaccacg

SEQ ID NO: 4768 - DNA, 20 bp, Artificial Sequence
  Description of Artificial Sequence:  Hypothetical Probe Sequence
ggacctgtgtgccttgcgtt

SEQ ID NO: 4769 - DNA, 20 bp, Artificial Sequence
  Description of Artificial Sequence:  Hypothetical Probe Sequence
ggacggacaatcgatgcacg

SEQ ID NO: 4770 - DNA, 20 bp, Artificial Sequence
  Description of Artificial Sequence:  Hypothetical Probe Sequence
tctgcgttcctatgcgcgaa

SEQ ID NO: 4771 - DNA, 20 bp, Artificial Sequence
  Description of Artificial Sequence:  Hypothetical Probe Sequence
cgtttcccatacgatgcgaa

SEQ ID NO: 4772 - DNA, 20 bp, Artificial Sequence
  Description of Artificial Sequence:  Hypothetical Probe Sequence
cgaatctgtccctcccggac

SEQ ID NO: 4773 - DNA, 20 bp, Artificial Sequence
  Description of Artificial Sequence:  Hypothetical Probe Sequence
cgaagcaaacggtgtcgatg

SEQ ID NO: 4774 - DNA, 20 bp, Artificial Sequence
  Description of Artificial Sequence:  Hypothetical Probe Sequence
aatccgaacacggaccggac

SEQ ID NO: 4775 - DNA, 20 bp, Artificial Sequence
  Description of Artificial Sequence:  Hypothetical Probe Sequence
gcttttaggatgcagcacgg

SEQ ID NO: 4776 - DNA, 20 bp, Artificial Sequence
  Description of Artificial Sequence:  Hypothetical Probe Sequence
gcttccatcgaagaccggta

SEQ ID NO: 4777 - DNA, 20 bp, Artificial Sequence
  Description of Artificial Sequence:  Hypothetical Probe Sequence
gagtcgaatgcgtcccagcc

SEQ ID NO: 4778 - DNA, 20 bp, Artificial Sequence
  Description of Artificial Sequence:  Hypothetical Probe Sequence
aggaacggcgttcttggctt

SEQ ID NO: 4779 - DNA, 20 bp, Artificial Sequence
  Description of Artificial Sequence:  Hypothetical Probe Sequence
tgcgtcgttctgtcccgatg

SEQ ID NO: 4780 - DNA, 20 bp, Artificial Sequence
  Description of Artificial Sequence:  Hypothetical Probe Sequence
cagcgatgggacgagtcgtt

SEQ ID NO: 4781 - DNA, 20 bp, Artificial Sequence
  Description of Artificial Sequence:  Hypothetical Probe Sequence
gtgcaggactcaggactgcg

SEQ ID NO: 4782 - DNA, 20 bp, Artificial Sequence
  Description of Artificial Sequence:  Hypothetical Probe Sequence
ggactgcgccatacctgcaa

SEQ ID NO: 4783 - DNA, 20 bp, Artificial Sequence
  Description of Artificial Sequence:  Hypothetical Probe Sequence
agccatcgctgtgcttgcaa

SEQ ID NO: 4784 - DNA, 20 bp, Artificial Sequence
  Description of Artificial Sequence:  Hypothetical Probe Sequence
agccgtgcggtagaccggac

SEQ ID NO: 4785 - DNA, 20 bp, Artificial Sequence
  Description of Artificial Sequence:  Hypothetical Probe Sequence
gcttggacgagttgcggcaa

SEQ ID NO: 4786 - DNA, 20 bp, Artificial Sequence
  Description of Artificial Sequence:  Hypothetical Probe Sequence
gcaagaccatcgcacggcaa

SEQ ID NO: 4787 - DNA, 20 bp, Artificial Sequence
  Description of Artificial Sequence:  Hypothetical Probe Sequence
cagcctcaagcccgaagtgc

SEQ ID NO: 4788 - DNA, 20 bp, Artificial Sequence
  Description of Artificial Sequence:  Hypothetical Probe Sequence
gtgctcgtgctttgcgtgcg

SEQ ID NO: 4789 - DNA, 20 bp, Artificial Sequence
  Description of Artificial Sequence:  Hypothetical Probe Sequence
cgtttgtccttggatgcgaa

SEQ ID NO: 4790 - DNA, 20 bp, Artificial Sequence
  Description of Artificial Sequence:  Hypothetical Probe Sequence
ctcatcgtggaccgaaagcc

SEQ ID NO: 4791 - DNA, 20 bp, Artificial Sequence
  Description of Artificial Sequence:  Hypothetical Probe Sequence
cgaactgtagtgcagcacgg

SEQ ID NO: 4792 - DNA, 20 bp, Artificial Sequence
  Description of Artificial Sequence:  Hypothetical Probe Sequence
atcgcttgctgtacggcgaa

SEQ ID NO: 4793 - DNA, 20 bp, Artificial Sequence
  Description of Artificial Sequence:  Hypothetical Probe Sequence
atcgggtatgcgcacgtgtc

SEQ ID NO: 4794 - DNA, 20 bp, Artificial Sequence
  Description of Artificial Sequence:  Hypothetical Probe Sequence
tgcgatcgaggactcaacgg

SEQ ID NO: 4795 - DNA, 20 bp, Artificial Sequence
  Description of Artificial Sequence:  Hypothetical Probe Sequence
gaccgcaactgttcgtgctt

SEQ ID NO: 4796 - DNA, 20 bp, Artificial Sequence
  Description of Artificial Sequence:  Hypothetical Probe Sequence
ggaccgaaagtgccatggac

SEQ ID NO: 4797 - DNA, 20 bp, Artificial Sequence
  Description of Artificial Sequence:  Hypothetical Probe Sequence
ccattccctccccagcgcaa

SEQ ID NO: 4798 - DNA, 20 bp, Artificial Sequence
  Description of Artificial Sequence:  Hypothetical Probe Sequence
tccccttgcgaatgcgtgcg

SEQ ID NO: 4799 - DNA, 20 bp, Artificial Sequence
  Description of Artificial Sequence:  Hypothetical Probe Sequence
acggctgttcgttgtcgcaa

SEQ ID NO: 4800 - DNA, 20 bp, Artificial Sequence
  Description of Artificial Sequence:  Hypothetical Probe Sequence
acgggctttgtccacggagt

SEQ ID NO: 4801 - DNA, 20 bp, Artificial Sequence
  Description of Artificial Sequence:  Hypothetical Probe Sequence
acggacggccatccatgctt

SEQ ID NO: 4802 - DNA, 20 bp, Artificial Sequence
  Description of Artificial Sequence:  Hypothetical Probe Sequence
ttgaagcccgttcgaaacgg

SEQ ID NO: 4803 - DNA, 20 bp, Artificial Sequence
  Description of Artificial Sequence:  Hypothetical Probe Sequence
tgattgcgcttgggacgatg

SEQ ID NO: 4804 - DNA, 20 bp, Artificial Sequence
  Description of Artificial Sequence:  Hypothetical Probe Sequence
aatctgcgcgaatgtctgcg

SEQ ID NO: 4805 - DNA, 20 bp, Artificial Sequence
  Description of Artificial Sequence:  Hypothetical Probe Sequence
aatccacgttagtgcgcacg

SEQ ID NO: 4806 - DNA, 20 bp, Artificial Sequence
  Description of Artificial Sequence:  Hypothetical Probe Sequence
tctgcttgctgtgctttccc

SEQ ID NO: 4807 - DNA, 20 bp, Artificial Sequence
  Description of Artificial Sequence:  Hypothetical Probe Sequence
cttggcttagtggcttcacg

SEQ ID NO: 4808 - DNA, 20 bp, Artificial Sequence
  Description of Artificial Sequence:  Hypothetical Probe Sequence
cttggatgccatacggtgcg

SEQ ID NO: 4809 - DNA, 20 bp, Artificial Sequence
  Description of Artificial Sequence:  Hypothetical Probe Sequence
cttggaccctgtcacggcaa

SEQ ID NO: 4810 - DNA, 20 bp, Artificial Sequence
  Description of Artificial Sequence:  Hypothetical Probe Sequence
cgttatcgcacggagtgcaa

SEQ ID NO: 4811 - DNA, 20 bp, Artificial Sequence
  Description of Artificial Sequence:  Hypothetical Probe Sequence
cgttagccggacctgtcacg

SEQ ID NO: 4812 - DNA, 20 bp, Artificial Sequence
  Description of Artificial Sequence:  Hypothetical Probe Sequence
tctgccatgaccgacctccc

SEQ ID NO: 4813 - DNA, 20 bp, Artificial Sequence
  Description of Artificial Sequence:  Hypothetical Probe Sequence
gctttgtccagcgcaatccc

SEQ ID NO: 4814 - DNA, 20 bp, Artificial Sequence
  Description of Artificial Sequence:  Hypothetical Probe Sequence
gcttgtgcgtctgtgccgtt

SEQ ID NO: 4815 - DNA, 20 bp, Artificial Sequence
  Description of Artificial Sequence:  Hypothetical Probe Sequence
ggtacgttcgaatcccccat

SEQ ID NO: 4816 - DNA, 20 bp, Artificial Sequence
  Description of Artificial Sequence:  Hypothetical Probe Sequence
tctgggtagtgcatcgcgaa

SEQ ID NO: 4817 - DNA, 20 bp, Artificial Sequence
  Description of Artificial Sequence:  Hypothetical Probe Sequence
acctacgggtgccgttgtgc

SEQ ID NO: 4818 - DNA, 20 bp, Artificial Sequence
  Description of Artificial Sequence:  Hypothetical Probe Sequence
atcgtgcggtctacgggtgc

SEQ ID NO: 4819 - DNA, 20 bp, Artificial Sequence
  Description of Artificial Sequence:  Hypothetical Probe Sequence
atcgggaccagcatcggacc

SEQ ID NO: 4820 - DNA, 20 bp, Artificial Sequence
  Description of Artificial Sequence:  Hypothetical Probe Sequence
tcccctgtgaccagccgatg

SEQ ID NO: 4821 - DNA, 20 bp, Artificial Sequence
  Description of Artificial Sequence:  Hypothetical Probe Sequence
tgcgaaagggaccagcagga

SEQ ID NO: 4822 - DNA, 20 bp, Artificial Sequence
  Description of Artificial Sequence:  Hypothetical Probe Sequence
cacgacctttgatcccgatg

SEQ ID NO: 4823 - DNA, 20 bp, Artificial Sequence
  Description of Artificial Sequence:  Hypothetical Probe Sequence
gtgcaatcgacccacgcagc

SEQ ID NO: 4824 - DNA, 20 bp, Artificial Sequence
  Description of Artificial Sequence:  Hypothetical Probe Sequence
agccgacctcgtgatgcttg

SEQ ID NO: 4825 - DNA, 20 bp, Artificial Sequence
  Description of Artificial Sequence:  Hypothetical Probe Sequence
tcgtgtgctcgtgaccgcaa

SEQ ID NO: 4826 - DNA, 20 bp, Artificial Sequence
  Description of Artificial Sequence:  Hypothetical Probe Sequence
cgttttgaggacgaccatcg

SEQ ID NO: 4827 - DNA, 20 bp, Artificial Sequence
  Description of Artificial Sequence:  Hypothetical Probe Sequence
cgtttgattccccttggcaa

SEQ ID NO: 4828 - DNA, 20 bp, Artificial Sequence
  Description of Artificial Sequence:  Hypothetical Probe Sequence
tgtccgttgtgccgttcagc

SEQ ID NO: 4829 - DNA, 20 bp, Artificial Sequence
  Description of Artificial Sequence:  Hypothetical Probe Sequence
ccatttgaaaagcagctgcg

SEQ ID NO: 4830 - DNA, 20 bp, Artificial Sequence
  Description of Artificial Sequence:  Hypothetical Probe Sequence
tgtcgcttacggatacagcc

SEQ ID NO: 4831 - DNA, 20 bp, Artificial Sequence
  Description of Artificial Sequence:  Hypothetical Probe Sequence
ggtaggacatcgggaccacg

SEQ ID NO: 4832 - DNA, 20 bp, Artificial Sequence
  Description of Artificial Sequence:  Hypothetical Probe Sequence
gagtgcttgtgcgtgcgacc

SEQ ID NO: 4833 - DNA, 20 bp, Artificial Sequence
  Description of Artificial Sequence:  Hypothetical Probe Sequence
gcaacttgcttggtgctccc

SEQ ID NO: 4834 - DNA, 20 bp, Artificial Sequence
  Description of Artificial Sequence:  Hypothetical Probe Sequence
tgtcgcaaccatcacggtct

SEQ ID NO: 4835 - DNA, 20 bp, Artificial Sequence
  Description of Artificial Sequence:  Hypothetical Probe Sequence
tgtcgcaaggtaaatctgcg

SEQ ID NO: 4836 - DNA, 20 bp, Artificial Sequence
  Description of Artificial Sequence:  Hypothetical Probe Sequence
atcggaccaatcatcgcgaa

SEQ ID NO: 4837 - DNA, 20 bp, Artificial Sequence
  Description of Artificial Sequence:  Hypothetical Probe Sequence
aggacgaatcccatcggcaa

SEQ ID NO: 4838 - DNA, 20 bp, Artificial Sequence
  Description of Artificial Sequence:  Hypothetical Probe Sequence
gatgcttgtacatcccgcaa

SEQ ID NO: 4839 - DNA, 20 bp, Artificial Sequence
  Description of Artificial Sequence:  Hypothetical Probe Sequence
gatggatggacctgcgacgg

SEQ ID NO: 4840 - DNA, 20 bp, Artificial Sequence
  Description of Artificial Sequence:  Hypothetical Probe Sequence
tgtcgatgtccctcgtgctt

SEQ ID NO: 4841 - DNA, 20 bp, Artificial Sequence
  Description of Artificial Sequence:  Hypothetical Probe Sequence
tgtcgatgtgcgcctacagc

SEQ ID NO: 4842 - DNA, 20 bp, Artificial Sequence
  Description of Artificial Sequence:  Hypothetical Probe Sequence
gatgcacgacctttagcgaa

SEQ ID NO: 4843 - DNA, 20 bp, Artificial Sequence
  Description of Artificial Sequence:  Hypothetical Probe Sequence
tgcgcctatgatcttgcagc

SEQ ID NO: 4844 - DNA, 20 bp, Artificial Sequence
  Description of Artificial Sequence:  Hypothetical Probe Sequence
tgtccacggcaaaaagccta

SEQ ID NO: 4845 - DNA, 20 bp, Artificial Sequence
  Description of Artificial Sequence:  Hypothetical Probe Sequence
tgtccacgcagcaatcagcc

SEQ ID NO: 4846 - DNA, 20 bp, Artificial Sequence
  Description of Artificial Sequence:  Hypothetical Probe Sequence
cagcatcgccatgatggctt

SEQ ID NO: 4847 - DNA, 20 bp, Artificial Sequence
  Description of Artificial Sequence:  Hypothetical Probe Sequence
tgtccagccagccttgcgaa

SEQ ID NO: 4848 - DNA, 20 bp, Artificial Sequence
  Description of Artificial Sequence:  Hypothetical Probe Sequence
gaccaaagagccagcccgaa

SEQ ID NO: 4849 - DNA, 20 bp, Artificial Sequence
  Description of Artificial Sequence:  Hypothetical Probe Sequence
tgtcgaccggtaagccgacc

SEQ ID NO: 4850 - DNA, 20 bp, Artificial Sequence
  Description of Artificial Sequence:  Hypothetical Probe Sequence
gaccagtgcagcgatggcaa

SEQ ID NO: 4851 - DNA, 20 bp, Artificial Sequence
  Description of Artificial Sequence:  Hypothetical Probe Sequence
tgtcgacctcccgacctcgt

SEQ ID NO: 4852 - DNA, 20 bp, Artificial Sequence
  Description of Artificial Sequence:  Hypothetical Probe Sequence
gaccgtgctgtcaatccacg

SEQ ID NO: 4853 - DNA, 20 bp, Artificial Sequence
  Description of Artificial Sequence:  Hypothetical Probe Sequence
gtgctgtctcgtagcccgaa

SEQ ID NO: 4854 - DNA, 20 bp, Artificial Sequence
  Description of Artificial Sequence:  Hypothetical Probe Sequence
tgtcgtgccctatctgtgcg

SEQ ID NO: 4855 - DNA, 20 bp, Artificial Sequence
  Description of Artificial Sequence:  Hypothetical Probe Sequence
tgtcgtgccagcccatagga

SEQ ID NO: 4856 - DNA, 20 bp, Artificial Sequence
  Description of Artificial Sequence:  Hypothetical Probe Sequence
tgtcggacaaagtgcgacgg

SEQ ID NO: 4857 - DNA, 20 bp, Artificial Sequence
  Description of Artificial Sequence:  Hypothetical Probe Sequence
ggacctcaatacgtgccagc

SEQ ID NO: 4858 - DNA, 20 bp, Artificial Sequence
  Description of Artificial Sequence:  Hypothetical Probe Sequence
tgtcggacccatgaccctca

SEQ ID NO: 4859 - DNA, 20 bp, Artificial Sequence
  Description of Artificial Sequence:  Hypothetical Probe Sequence
acggcgttaaagtgtccgaa

SEQ ID NO: 4860 - DNA, 20 bp, Artificial Sequence
  Description of Artificial Sequence:  Hypothetical Probe Sequence
agcccttgcagcaaagcttg

SEQ ID NO: 4861 - DNA, 20 bp, Artificial Sequence
  Description of Artificial Sequence:  Hypothetical Probe Sequence
aaagacggtgtcgcaacacg

SEQ ID NO: 4862 - DNA, 20 bp, Artificial Sequence
  Description of Artificial Sequence:  Hypothetical Probe Sequence
cttgcttgcgttatcgccat

SEQ ID NO: 4863 - DNA, 20 bp, Artificial Sequence
  Description of Artificial Sequence:  Hypothetical Probe Sequence
cgttgcaactcaggtatgcg

SEQ ID NO: 4864 - DNA, 20 bp, Artificial Sequence
  Description of Artificial Sequence:  Hypothetical Probe Sequence
cgttaggaacctacggcgaa

SEQ ID NO: 4865 - DNA, 20 bp, Artificial Sequence
  Description of Artificial Sequence:  Hypothetical Probe Sequence
cgttcacgtacatcgttgcg

SEQ ID NO: 4866 - DNA, 20 bp, Artificial Sequence
  Description of Artificial Sequence:  Hypothetical Probe Sequence
ctgttcgtgaccacggtgcg

SEQ ID NO: 4867 - DNA, 20 bp, Artificial Sequence
  Description of Artificial Sequence:  Hypothetical Probe Sequence
ccatatcgcagcccatcagc

SEQ ID NO: 4868 - DNA, 20 bp, Artificial Sequence
  Description of Artificial Sequence:  Hypothetical Probe Sequence
tcgtccatggaccgaagcaa

SEQ ID NO: 4869 - DNA, 20 bp, Artificial Sequence
  Description of Artificial Sequence:  Hypothetical Probe Sequence
acctgtgccagccacggtgc

SEQ ID NO: 4870 - DNA, 20 bp, Artificial Sequence
  Description of Artificial Sequence:  Hypothetical Probe Sequence
atcgctgtacctcgtttgcg

SEQ ID NO: 4871 - DNA, 20 bp, Artificial Sequence
  Description of Artificial Sequence:  Hypothetical Probe Sequence
cctaacggatcgttgaagcc

SEQ ID NO: 4872 - DNA, 20 bp, Artificial Sequence
  Description of Artificial Sequence:  Hypothetical Probe Sequence
tcgtgatgatcggtgcacgg

SEQ ID NO: 4873 - DNA, 20 bp, Artificial Sequence
  Description of Artificial Sequence:  Hypothetical Probe Sequence
tcgttcccctcaagtggacc

SEQ ID NO: 4874 - DNA, 20 bp, Artificial Sequence
  Description of Artificial Sequence:  Hypothetical Probe Sequence
tcccagtggatgggacccat

SEQ ID NO: 4875 - DNA, 20 bp, Artificial Sequence
  Description of Artificial Sequence:  Hypothetical Probe Sequence
tcgttcccgatgaggaacgg

SEQ ID NO: 4876 - DNA, 20 bp, Artificial Sequence
  Description of Artificial Sequence:  Hypothetical Probe Sequence
tccccagccgttgtctcagc

SEQ ID NO: 4877 - DNA, 20 bp, Artificial Sequence
  Description of Artificial Sequence:  Hypothetical Probe Sequence
tgcggcaatgatccatcacg

SEQ ID NO: 4878 - DNA, 20 bp, Artificial Sequence
  Description of Artificial Sequence:  Hypothetical Probe Sequence
tgcgtcccctcagtgcctca

SEQ ID NO: 4879 - DNA, 20 bp, Artificial Sequence
  Description of Artificial Sequence:  Hypothetical Probe Sequence
tcgttgcgcacgtgatcgtt

SEQ ID NO: 4880 - DNA, 20 bp, Artificial Sequence
  Description of Artificial Sequence:  Hypothetical Probe Sequence
tgcggtgctgatggacatcg

SEQ ID NO: 4881 - DNA, 20 bp, Artificial Sequence
  Description of Artificial Sequence:  Hypothetical Probe Sequence
tcgtgaccgaccgatgtccc

SEQ ID NO: 4882 - DNA, 20 bp, Artificial Sequence
  Description of Artificial Sequence:  Hypothetical Probe Sequence
gtgcgatggagtgtgcccat

SEQ ID NO: 4883 - DNA, 20 bp, Artificial Sequence
  Description of Artificial Sequence:  Hypothetical Probe Sequence
gtgcgacctgatatcggtgc

SEQ ID NO: 4884 - DNA, 20 bp, Artificial Sequence
  Description of Artificial Sequence:  Hypothetical Probe Sequence
tcgtggacaggagatggctt

SEQ ID NO: 4885 - DNA, 20 bp, Artificial Sequence
  Description of Artificial Sequence:  Hypothetical Probe Sequence
acggtgatcacgcagcacgg

SEQ ID NO: 4886 - DNA, 20 bp, Artificial Sequence
  Description of Artificial Sequence:  Hypothetical Probe Sequence
tcgtacggggacaaagcgtt

SEQ ID NO: 4887 - DNA, 20 bp, Artificial Sequence
  Description of Artificial Sequence:  Hypothetical Probe Sequence
tgtcgtgcacggctgttgcg

SEQ ID NO: 4888 - DNA, 20 bp, Artificial Sequence
  Description of Artificial Sequence:  Hypothetical Probe Sequence
tcgtccatagcctcccggta

SEQ ID NO: 4889 - DNA, 20 bp, Artificial Sequence
  Description of Artificial Sequence:  Hypothetical Probe Sequence
ccatgtcttgcggcttacgg

SEQ ID NO: 4890 - DNA, 20 bp, Artificial Sequence
  Description of Artificial Sequence:  Hypothetical Probe Sequence
gctttcgtccatcttggtgc

SEQ ID NO: 4891 - DNA, 20 bp, Artificial Sequence
  Description of Artificial Sequence:  Hypothetical Probe Sequence
aggagctttgcgccatgcaa

SEQ ID NO: 4892 - DNA, 20 bp, Artificial Sequence
  Description of Artificial Sequence:  Hypothetical Probe Sequence
tcccaaaggcttgcaatccc

SEQ ID NO: 4893 - DNA, 20 bp, Artificial Sequence
  Description of Artificial Sequence:  Hypothetical Probe Sequence
cttgtgcgcttgaaagcgaa

SEQ ID NO: 4894 - DNA, 20 bp, Artificial Sequence
  Description of Artificial Sequence:  Hypothetical Probe Sequence
tgcggagttgtcagccggta

SEQ ID NO: 4895 - DNA, 20 bp, Artificial Sequence
  Description of Artificial Sequence:  Hypothetical Probe Sequence
cacgtgtctcccagccccat

SEQ ID NO: 4896 - DNA, 20 bp, Artificial Sequence
  Description of Artificial Sequence:  Hypothetical Probe Sequence
cacgctgtcgaattagcagc

SEQ ID NO: 4897 - DNA, 20 bp, Artificial Sequence
  Description of Artificial Sequence:  Hypothetical Probe Sequence
ggacacctctgtgtgcgcaa

SEQ ID NO: 4898 - DNA, 20 bp, Artificial Sequence
  Description of Artificial Sequence:  Hypothetical Probe Sequence
acggagtgacggcgaacgaa

SEQ ID NO: 4899 - DNA, 20 bp, Artificial Sequence
  Description of Artificial Sequence:  Hypothetical Probe Sequence
agccaatctgcggcaaccat

SEQ ID NO: 4900 - DNA, 20 bp, Artificial Sequence
  Description of Artificial Sequence:  Hypothetical Probe Sequence
agccgtctcctaatcgagcc

SEQ ID NO: 4901 - DNA, 20 bp, Artificial Sequence
  Description of Artificial Sequence:  Hypothetical Probe Sequence
agccagtgaaagtgcgcacg

SEQ ID NO: 4902 - DNA, 20 bp, Artificial Sequence
  Description of Artificial Sequence:  Hypothetical Probe Sequence
tctgtcgttcccgtgcggac

SEQ ID NO: 4903 - DNA, 20 bp, Artificial Sequence
  Description of Artificial Sequence:  Hypothetical Probe Sequence
tcgtgtctggaccacgtccc

SEQ ID NO: 4904 - DNA, 20 bp, Artificial Sequence
  Description of Artificial Sequence:  Hypothetical Probe Sequence
cgttgctttgcggatgtcgt

SEQ ID NO: 4905 - DNA, 20 bp, Artificial Sequence
  Description of Artificial Sequence:  Hypothetical Probe Sequence
ggtaaaagtcgttcccagcc

SEQ ID NO: 4906 - DNA, 20 bp, Artificial Sequence
  Description of Artificial Sequence:  Hypothetical Probe Sequence
ggtacacgccatcagccacg

SEQ ID NO: 4907 - DNA, 20 bp, Artificial Sequence
  Description of Artificial Sequence:  Hypothetical Probe Sequence
cctacacgcttgtgcggacc

SEQ ID NO: 4908 - DNA, 20 bp, Artificial Sequence
  Description of Artificial Sequence:  Hypothetical Probe Sequence
tccccgttggtaaatcccat

SEQ ID NO: 4909 - DNA, 20 bp, Artificial Sequence
  Description of Artificial Sequence:  Hypothetical Probe Sequence
tcccccattgtcgagtcgtt

SEQ ID NO: 4910 - DNA, 20 bp, Artificial Sequence
  Description of Artificial Sequence:  Hypothetical Probe Sequence
cgtttcccgtgctgcgagtg

SEQ ID NO: 4911 - DNA, 20 bp, Artificial Sequence
  Description of Artificial Sequence:  Hypothetical Probe Sequence
tgcgttagagtgcacgatcg

SEQ ID NO: 4912 - DNA, 20 bp, Artificial Sequence
  Description of Artificial Sequence:  Hypothetical Probe Sequence
cacgcacgtgtcaaagtccc

SEQ ID NO: 4913 - DNA, 20 bp, Artificial Sequence
  Description of Artificial Sequence:  Hypothetical Probe Sequence
gacccttggcaatacaacgg

SEQ ID NO: 4914 - DNA, 20 bp, Artificial Sequence
  Description of Artificial Sequence:  Hypothetical Probe Sequence
gtgcacggcttgtgtccgtt

SEQ ID NO: 4915 - DNA, 20 bp, Artificial Sequence
  Description of Artificial Sequence:  Hypothetical Probe Sequence
aaagtgcgtcgttgattgcg

SEQ ID NO: 4916 - DNA, 20 bp, Artificial Sequence
  Description of Artificial Sequence:  Hypothetical Probe Sequence
aaaggacctctgcagccgtt

SEQ ID NO: 4917 - DNA, 20 bp, Artificial Sequence
  Description of Artificial Sequence:  Hypothetical Probe Sequence
tcgtgcaacgttgaccacgg

SEQ ID NO: 4918 - DNA, 20 bp, Artificial Sequence
  Description of Artificial Sequence:  Hypothetical Probe Sequence
tcccggacaggagtgcacct

SEQ ID NO: 4919 - DNA, 20 bp, Artificial Sequence
  Description of Artificial Sequence:  Hypothetical Probe Sequence
gatgcagccgaaatcgcagc

SEQ ID NO: 4920 - DNA, 20 bp, Artificial Sequence
  Description of Artificial Sequence:  Hypothetical Probe Sequence
tccctgcgttgaggtatgcg

SEQ ID NO: 4921 - DNA, 20 bp, Artificial Sequence
  Description of Artificial Sequence:  Hypothetical Probe Sequence
tgcgacgggcaaccattgat

SEQ ID NO: 4922 - DNA, 20 bp, Artificial Sequence
  Description of Artificial Sequence:  Hypothetical Probe Sequence
gaccccatcttgatcggcaa

SEQ ID NO: 4923 - DNA, 20 bp, Artificial Sequence
  Description of Artificial Sequence:  Hypothetical Probe Sequence
gtgcatcggaccaccttgcg

SEQ ID NO: 4924 - DNA, 20 bp, Artificial Sequence
  Description of Artificial Sequence:  Hypothetical Probe Sequence
gtgccacgatacggaccgtt

SEQ ID NO: 4925 - DNA, 20 bp, Artificial Sequence
  Description of Artificial Sequence:  Hypothetical Probe Sequence
ggaccctaccattcccagcc

SEQ ID NO: 4926 - DNA, 20 bp, Artificial Sequence
  Description of Artificial Sequence:  Hypothetical Probe Sequence
ggaccacggtgcgatgctca

SEQ ID NO: 4927 - DNA, 20 bp, Artificial Sequence
  Description of Artificial Sequence:  Hypothetical Probe Sequence
tgtccagcttgaacggctgt

SEQ ID NO: 4928 - DNA, 20 bp, Artificial Sequence
  Description of Artificial Sequence:  Hypothetical Probe Sequence
ccattcgttcgtcgttgctt

SEQ ID NO: 4929 - DNA, 20 bp, Artificial Sequence
  Description of Artificial Sequence:  Hypothetical Probe Sequence
tcgtgagtcacgtgcgcagc

SEQ ID NO: 4930 - DNA, 20 bp, Artificial Sequence
  Description of Artificial Sequence:  Hypothetical Probe Sequence
tgcgatacggacatcggcaa

SEQ ID NO: 4931 - DNA, 20 bp, Artificial Sequence
  Description of Artificial Sequence:  Hypothetical Probe Sequence
tgcgcgaagatgctcacagc

SEQ ID NO: 4932 - DNA, 20 bp, Artificial Sequence
  Description of Artificial Sequence:  Hypothetical Probe Sequence
cacgaatcgcttgtgcgctt

SEQ ID NO: 4933 - DNA, 20 bp, Artificial Sequence
  Description of Artificial Sequence:  Hypothetical Probe Sequence
cagcagccaaaggtcttccc

SEQ ID NO: 4934 - DNA, 20 bp, Artificial Sequence
  Description of Artificial Sequence:  Hypothetical Probe Sequence
ttgatcccaatccgaatccc

SEQ ID NO: 4935 - DNA, 20 bp, Artificial Sequence
  Description of Artificial Sequence:  Hypothetical Probe Sequence
ttagcacgggtacagcacgg

SEQ ID NO: 4936 - DNA, 20 bp, Artificial Sequence
  Description of Artificial Sequence:  Hypothetical Probe Sequence
tgtctcccgtgcccatagcc

SEQ ID NO: 4937 - DNA, 20 bp, Artificial Sequence
  Description of Artificial Sequence:  Hypothetical Probe Sequence
tcgtaccttgcggtctcgtt

SEQ ID NO: 4938 - DNA, 20 bp, Artificial Sequence
  Description of Artificial Sequence:  Hypothetical Probe Sequence
tcgtcctaaggatcccagcc

SEQ ID NO: 4939 - DNA, 20 bp, Artificial Sequence
  Description of Artificial Sequence:  Hypothetical Probe Sequence
ctcacgttcacgcgtttgcg

SEQ ID NO: 4940 - DNA, 20 bp, Artificial Sequence
  Description of Artificial Sequence:  Hypothetical Probe Sequence
ccattgatcttgcacgcgtt

SEQ ID NO: 4941 - DNA, 20 bp, Artificial Sequence
  Description of Artificial Sequence:  Hypothetical Probe Sequence
cgaaccatcagcgaccgtct

SEQ ID NO: 4942 - DNA, 20 bp, Artificial Sequence
  Description of Artificial Sequence:  Hypothetical Probe Sequence
gcttctgttccccgtttccc

SEQ ID NO: 4943 - DNA, 20 bp, Artificial Sequence
  Description of Artificial Sequence:  Hypothetical Probe Sequence
atcgaccttctggatgcagc

SEQ ID NO: 4944 - DNA, 20 bp, Artificial Sequence
  Description of Artificial Sequence:  Hypothetical Probe Sequence
atcgacgggagttgtctgcg

SEQ ID NO: 4945 - DNA, 20 bp, Artificial Sequence
  Description of Artificial Sequence:  Hypothetical Probe Sequence
tgcggcttcgttaaagcttg

SEQ ID NO: 4946 - DNA, 20 bp, Artificial Sequence
  Description of Artificial Sequence:  Hypothetical Probe Sequence
cgaatgcgggtaatactgcg

SEQ ID NO: 4947 - DNA, 20 bp, Artificial Sequence
  Description of Artificial Sequence:  Hypothetical Probe Sequence
cgaaggacgtgcacctccta

SEQ ID NO: 4948 - DNA, 20 bp, Artificial Sequence
  Description of Artificial Sequence:  Hypothetical Probe Sequence
acggttagctgtcagcacgg

SEQ ID NO: 4949 - DNA, 20 bp, Artificial Sequence
  Description of Artificial Sequence:  Hypothetical Probe Sequence
cgaaacggagccgtctcgtt

SEQ ID NO: 4950 - DNA, 20 bp, Artificial Sequence
  Description of Artificial Sequence:  Hypothetical Probe Sequence
agccgcaaagtgaatcgtgc

SEQ ID NO: 4951 - DNA, 20 bp, Artificial Sequence
  Description of Artificial Sequence:  Hypothetical Probe Sequence
tcgtcgaagtctcacgccat

SEQ ID NO: 4952 - DNA, 20 bp, Artificial Sequence
  Description of Artificial Sequence:  Hypothetical Probe Sequence
cttgacggagccttgacacg

SEQ ID NO: 4953 - DNA, 20 bp, Artificial Sequence
  Description of Artificial Sequence:  Hypothetical Probe Sequence
cttgcgtttgcgcctagcaa

SEQ ID NO: 4954 - DNA, 20 bp, Artificial Sequence
  Description of Artificial Sequence:  Hypothetical Probe Sequence
gtgcggaccctaacggctca

SEQ ID NO: 4955 - DNA, 20 bp, Artificial Sequence
  Description of Artificial Sequence:  Hypothetical Probe Sequence
gacccagctgtcggaccacg

SEQ ID NO: 4956 - DNA, 20 bp, Artificial Sequence
  Description of Artificial Sequence:  Hypothetical Probe Sequence
gtgccttgtgcgcgaacgtt

SEQ ID NO: 4957 - DNA, 20 bp, Artificial Sequence
  Description of Artificial Sequence:  Hypothetical Probe Sequence
tacatcccggacacgggcaa

SEQ ID NO: 4958 - DNA, 20 bp, Artificial Sequence
  Description of Artificial Sequence:  Hypothetical Probe Sequence
tcgtgatggtcttgcgtccc

SEQ ID NO: 4959 - DNA, 20 bp, Artificial Sequence
  Description of Artificial Sequence:  Hypothetical Probe Sequence
cgttggaccttgctgttccc

SEQ ID NO: 4960 - DNA, 20 bp, Artificial Sequence
  Description of Artificial Sequence:  Hypothetical Probe Sequence
ctcaacctccattcgttccc

SEQ ID NO: 4961 - DNA, 20 bp, Artificial Sequence
  Description of Artificial Sequence:  Hypothetical Probe Sequence
ctcatgcgcacgtctggtgc

SEQ ID NO: 4962 - DNA, 20 bp, Artificial Sequence
  Description of Artificial Sequence:  Hypothetical Probe Sequence
gcaattagcacgccatcgaa

SEQ ID NO: 4963 - DNA, 20 bp, Artificial Sequence
  Description of Artificial Sequence:  Hypothetical Probe Sequence
agtgtcgtttgatgcgggac

SEQ ID NO: 4964 - DNA, 20 bp, Artificial Sequence
  Description of Artificial Sequence:  Hypothetical Probe Sequence
acctctcatgcgtgattgcg

SEQ ID NO: 4965 - DNA, 20 bp, Artificial Sequence
  Description of Artificial Sequence:  Hypothetical Probe Sequence
gcaaatcgatcgcgaacgaa

SEQ ID NO: 4966 - DNA, 20 bp, Artificial Sequence
  Description of Artificial Sequence:  Hypothetical Probe Sequence
gcaaatcgagccaatcggta

SEQ ID NO: 4967 - DNA, 20 bp, Artificial Sequence
  Description of Artificial Sequence:  Hypothetical Probe Sequence
ggacgtcttgtccgttcacg

SEQ ID NO: 4968 - DNA, 20 bp, Artificial Sequence
  Description of Artificial Sequence:  Hypothetical Probe Sequence
gcaaagcccgttcagcacct

SEQ ID NO: 4969 - DNA, 20 bp, Artificial Sequence
  Description of Artificial Sequence:  Hypothetical Probe Sequence
cgaacttgtctgggactgcg

SEQ ID NO: 4970 - DNA, 20 bp, Artificial Sequence
  Description of Artificial Sequence:  Hypothetical Probe Sequence
ttagcgtttgtctgcgtccc

SEQ ID NO: 4971 - DNA, 20 bp, Artificial Sequence
  Description of Artificial Sequence:  Hypothetical Probe Sequence
cgaaccattacatgcggctt

SEQ ID NO: 4972 - DNA, 20 bp, Artificial Sequence
  Description of Artificial Sequence:  Hypothetical Probe Sequence
gcttcgaagtgcctgtcagc

SEQ ID NO: 4973 - DNA, 20 bp, Artificial Sequence
  Description of Artificial Sequence:  Hypothetical Probe Sequence
gtgcttgacacgatcgcacg

SEQ ID NO: 4974 - DNA, 20 bp, Artificial Sequence
  Description of Artificial Sequence:  Hypothetical Probe Sequence
atcgaaagctcagtgcgcaa

SEQ ID NO: 4975 - DNA, 20 bp, Artificial Sequence
  Description of Artificial Sequence:  Hypothetical Probe Sequence
atcgcttgtgtctgcgagcc

SEQ ID NO: 4976 - DNA, 20 bp, Artificial Sequence
  Description of Artificial Sequence:  Hypothetical Probe Sequence
atcgcttgcgaaaaagctgt

SEQ ID NO: 4977 - DNA, 20 bp, Artificial Sequence
  Description of Artificial Sequence:  Hypothetical Probe Sequence
cgttgagtaggaggacggac

SEQ ID NO: 4978 - DNA, 20 bp, Artificial Sequence
  Description of Artificial Sequence:  Hypothetical Probe Sequence
ctcatctggtgcggacgcaa

SEQ ID NO: 4979 - DNA, 20 bp, Artificial Sequence
  Description of Artificial Sequence:  Hypothetical Probe Sequence
ctgtgatgcgttacggcacg

SEQ ID NO: 4980 - DNA, 20 bp, Artificial Sequence
  Description of Artificial Sequence:  Hypothetical Probe Sequence
atcgccataatccagccagc

SEQ ID NO: 4981 - DNA, 20 bp, Artificial Sequence
  Description of Artificial Sequence:  Hypothetical Probe Sequence
atcggcttcagcaaagtctg

SEQ ID NO: 4982 - DNA, 20 bp, Artificial Sequence
  Description of Artificial Sequence:  Hypothetical Probe Sequence
atcggagtggaccacgcttg

SEQ ID NO: 4983 - DNA, 20 bp, Artificial Sequence
  Description of Artificial Sequence:  Hypothetical Probe Sequence
agtgctcaaggaatcggcaa

SEQ ID NO: 4984 - DNA, 20 bp, Artificial Sequence
  Description of Artificial Sequence:  Hypothetical Probe Sequence
atcgcctagatgtgcgagga

SEQ ID NO: 4985 - DNA, 20 bp, Artificial Sequence
  Description of Artificial Sequence:  Hypothetical Probe Sequence
tcccagccctgtgatggtgc

SEQ ID NO: 4986 - DNA, 20 bp, Artificial Sequence
  Description of Artificial Sequence:  Hypothetical Probe Sequence
atcgggactacaatcgcagc

SEQ ID NO: 4987 - DNA, 20 bp, Artificial Sequence
  Description of Artificial Sequence:  Hypothetical Probe Sequence
acggtgtccgaaccatgcaa

SEQ ID NO: 4988 - DNA, 20 bp, Artificial Sequence
  Description of Artificial Sequence:  Hypothetical Probe Sequence
agccgagtttgacgaacacg

SEQ ID NO: 4989 - DNA, 20 bp, Artificial Sequence
  Description of Artificial Sequence:  Hypothetical Probe Sequence
tcgtgaccaggacagcacgg

SEQ ID NO: 4990 - DNA, 20 bp, Artificial Sequence
  Description of Artificial Sequence:  Hypothetical Probe Sequence
gcttgatgtcccgcaatccc

SEQ ID NO: 4991 - DNA, 20 bp, Artificial Sequence
  Description of Artificial Sequence:  Hypothetical Probe Sequence
agtgggtagcaatccccacg

SEQ ID NO: 4992 - DNA, 20 bp, Artificial Sequence
  Description of Artificial Sequence:  Hypothetical Probe Sequence
gtgcgtgccttggaccacct

SEQ ID NO: 4993 - DNA, 20 bp, Artificial Sequence
  Description of Artificial Sequence:  Hypothetical Probe Sequence
cagcaggagaccgaccgcaa

SEQ ID NO: 4994 - DNA, 20 bp, Artificial Sequence
  Description of Artificial Sequence:  Hypothetical Probe Sequence
gatgccatgcaacagcagga

SEQ ID NO: 4995 - DNA, 20 bp, Artificial Sequence
  Description of Artificial Sequence:  Hypothetical Probe Sequence
ggaccttgcacgtcgtcgaa

SEQ ID NO: 4996 - DNA, 20 bp, Artificial Sequence
  Description of Artificial Sequence:  Hypothetical Probe Sequence
tccctgattccccgaacgtt

SEQ ID NO: 4997 - DNA, 20 bp, Artificial Sequence
  Description of Artificial Sequence:  Hypothetical Probe Sequence
tacatgcgttaggacccacg

SEQ ID NO: 4998 - DNA, 20 bp, Artificial Sequence
  Description of Artificial Sequence:  Hypothetical Probe Sequence
tctggatgcacgaatcgtgc

SEQ ID NO: 4999 - DNA, 20 bp, Artificial Sequence
  Description of Artificial Sequence:  Hypothetical Probe Sequence
tccccttgtgcgatcgctgt

SEQ ID NO: 5000 - DNA, 20 bp, Artificial Sequence
  Description of Artificial Sequence:  Hypothetical Probe Sequence
tccccgttacggagtggtct

SEQ ID NO: 5001 - DNA, 20 bp, Artificial Sequence
  Description of Artificial Sequence:  Hypothetical Probe Sequence
tcccctcatacaacggccat

SEQ ID NO: 5002 - DNA, 20 bp, Artificial Sequence
  Description of Artificial Sequence:  Hypothetical Probe Sequence
tcccctcactgtcctatccc

SEQ ID NO: 5003 - DNA, 20 bp, Artificial Sequence
  Description of Artificial Sequence:  Hypothetical Probe Sequence
tcccctcacctaatacacgg

SEQ ID NO: 5004 - DNA, 20 bp, Artificial Sequence
  Description of Artificial Sequence:  Hypothetical Probe Sequence
tcccccatatacgcaacagc

SEQ ID NO: 5005 - DNA, 20 bp, Artificial Sequence
  Description of Artificial Sequence:  Hypothetical Probe Sequence
tccccgaatgatgcttcgtt

SEQ ID NO: 5006 - DNA, 20 bp, Artificial Sequence
  Description of Artificial Sequence:  Hypothetical Probe Sequence
tcccggtagaccccatgacc

SEQ ID NO: 5007 - DNA, 20 bp, Artificial Sequence
  Description of Artificial Sequence:  Hypothetical Probe Sequence
tcccgtctctgtgatgagcc

SEQ ID NO: 5008 - DNA, 20 bp, Artificial Sequence
  Description of Artificial Sequence:  Hypothetical Probe Sequence
tcccgagttgtcgaccccat

SEQ ID NO: 5009 - DNA, 20 bp, Artificial Sequence
  Description of Artificial Sequence:  Hypothetical Probe Sequence
tcccgcaaaggagagtgatg

SEQ ID NO: 5010 - DNA, 20 bp, Artificial Sequence
  Description of Artificial Sequence:  Hypothetical Probe Sequence
tcccatcgtgtctgatagcc

SEQ ID NO: 5011 - DNA, 20 bp, Artificial Sequence
  Description of Artificial Sequence:  Hypothetical Probe Sequence
tcccaggactgtttgacacg

SEQ ID NO: 5012 - DNA, 20 bp, Artificial Sequence
  Description of Artificial Sequence:  Hypothetical Probe Sequence
tccccacgtacaggacaatc

SEQ ID NO: 5013 - DNA, 20 bp, Artificial Sequence
  Description of Artificial Sequence:  Hypothetical Probe Sequence
tccccacggcttcttgacct

SEQ ID NO: 5014 - DNA, 20 bp, Artificial Sequence
  Description of Artificial Sequence:  Hypothetical Probe Sequence
tcccgaccgcttggtaccat

SEQ ID NO: 5015 - DNA, 20 bp, Artificial Sequence
  Description of Artificial Sequence:  Hypothetical Probe Sequence
tcccggactgatcgttgatg

SEQ ID NO: 5016 - DNA, 20 bp, Artificial Sequence
  Description of Artificial Sequence:  Hypothetical Probe Sequence
tcccggacttagcgaacttg

SEQ ID NO: 5017 - DNA, 20 bp, Artificial Sequence
  Description of Artificial Sequence:  Hypothetical Probe Sequence
tcccacggcgaatgtcccta

SEQ ID NO: 5018 - DNA, 20 bp, Artificial Sequence
  Description of Artificial Sequence:  Hypothetical Probe Sequence
tcccacggtcccgagtggta

SEQ ID NO: 5019 - DNA, 20 bp, Artificial Sequence
  Description of Artificial Sequence:  Hypothetical Probe Sequence
tcccagcctacatgtcacgg

SEQ ID NO: 5020 - DNA, 20 bp, Artificial Sequence
  Description of Artificial Sequence:  Hypothetical Probe Sequence
tcccagccgatggatgatcg

SEQ ID NO: 5021 - DNA, 20 bp, Artificial Sequence
  Description of Artificial Sequence:  Hypothetical Probe Sequence
tgcgttgacttgagtgacgg

SEQ ID NO: 5022 - DNA, 20 bp, Artificial Sequence
  Description of Artificial Sequence:  Hypothetical Probe Sequence
tgcgttgaacctacggggac

SEQ ID NO: 5023 - DNA, 20 bp, Artificial Sequence
  Description of Artificial Sequence:  Hypothetical Probe Sequence
tgcgtgatcgttctcacagc

SEQ ID NO: 5024 - DNA, 20 bp, Artificial Sequence
  Description of Artificial Sequence:  Hypothetical Probe Sequence
tgcgtgatgtctcacgcgaa

SEQ ID NO: 5025 - DNA, 20 bp, Artificial Sequence
  Description of Artificial Sequence:  Hypothetical Probe Sequence
tgcgtgatgatgtgtccgaa

SEQ ID NO: 5026 - DNA, 20 bp, Artificial Sequence
  Description of Artificial Sequence:  Hypothetical Probe Sequence
tgcgaatcctgttgtccagc

SEQ ID NO: 5027 - DNA, 20 bp, Artificial Sequence
  Description of Artificial Sequence:  Hypothetical Probe Sequence
tgcgatacgtctgagtagcc

SEQ ID NO: 5028 - DNA, 20 bp, Artificial Sequence
  Description of Artificial Sequence:  Hypothetical Probe Sequence
tgcgaaagtgatagccagtg

SEQ ID NO: 5029 - DNA, 20 bp, Artificial Sequence
  Description of Artificial Sequence:  Hypothetical Probe Sequence
tgcgaaaggtgcaggagagt

SEQ ID NO: 5030 - DNA, 20 bp, Artificial Sequence
  Description of Artificial Sequence:  Hypothetical Probe Sequence
tgcgtacatcgtacggctca

SEQ ID NO: 5031 - DNA, 20 bp, Artificial Sequence
  Description of Artificial Sequence:  Hypothetical Probe Sequence
tgcgtacaggactgcgaaag

SEQ ID NO: 5032 - DNA, 20 bp, Artificial Sequence
  Description of Artificial Sequence:  Hypothetical Probe Sequence
tgcgtcgtggtacctatgtc

SEQ ID NO: 5033 - DNA, 20 bp, Artificial Sequence
  Description of Artificial Sequence:  Hypothetical Probe Sequence
tgcgcgttcctaaaagccat

SEQ ID NO: 5034 - DNA, 20 bp, Artificial Sequence
  Description of Artificial Sequence:  Hypothetical Probe Sequence
tgcgctcactcagaccaaag

SEQ ID NO: 5035 - DNA, 20 bp, Artificial Sequence
  Description of Artificial Sequence:  Hypothetical Probe Sequence
tgcgctcacgaaccatcgtt

SEQ ID NO: 5036 - DNA, 20 bp, Artificial Sequence
  Description of Artificial Sequence:  Hypothetical Probe Sequence
tgcgctcagagtttagcacg

SEQ ID NO: 5037 - DNA, 20 bp, Artificial Sequence
  Description of Artificial Sequence:  Hypothetical Probe Sequence
tgcgctcaagccaggagctt

SEQ ID NO: 5038 - DNA, 20 bp, Artificial Sequence
  Description of Artificial Sequence:  Hypothetical Probe Sequence
tgcgctgtttgagtgctcgt

SEQ ID NO: 5039 - DNA, 20 bp, Artificial Sequence
  Description of Artificial Sequence:  Hypothetical Probe Sequence
tgcgctgtcgttaggatctg

SEQ ID NO: 5040 - DNA, 20 bp, Artificial Sequence
  Description of Artificial Sequence:  Hypothetical Probe Sequence
tgcgctgtgagtctgtcgaa

SEQ ID NO: 5041 - DNA, 20 bp, Artificial Sequence
  Description of Artificial Sequence:  Hypothetical Probe Sequence
tgcgccatctgtagcctgat

SEQ ID NO: 5042 - DNA, 20 bp, Artificial Sequence
  Description of Artificial Sequence:  Hypothetical Probe Sequence
tgcgcgaagaccacctctgt

SEQ ID NO: 5043 - DNA, 20 bp, Artificial Sequence
  Description of Artificial Sequence:  Hypothetical Probe Sequence
tgcgcgaaggacgcaattag

SEQ ID NO: 5044 - DNA, 20 bp, Artificial Sequence
  Description of Artificial Sequence:  Hypothetical Probe Sequence
tgcggcttaatcctcagcaa

SEQ ID NO: 5045 - DNA, 20 bp, Artificial Sequence
  Description of Artificial Sequence:  Hypothetical Probe Sequence
tgcgggtatctgctgtgacc

SEQ ID NO: 5046 - DNA, 20 bp, Artificial Sequence
  Description of Artificial Sequence:  Hypothetical Probe Sequence
tgcgggtagatgcctagacc

SEQ ID NO: 5047 - DNA, 20 bp, Artificial Sequence
  Description of Artificial Sequence:  Hypothetical Probe Sequence
tgcggagtgagtgcttcagc

SEQ ID NO: 5048 - DNA, 20 bp, Artificial Sequence
  Description of Artificial Sequence:  Hypothetical Probe Sequence
tgcggagttgcgagtgcgaa

SEQ ID NO: 5049 - DNA, 20 bp, Artificial Sequence
  Description of Artificial Sequence:  Hypothetical Probe Sequence
tgcggagtcacgtccctaca

SEQ ID NO: 5050 - DNA, 20 bp, Artificial Sequence
  Description of Artificial Sequence:  Hypothetical Probe Sequence
tgcgagtgaatcggacggac

SEQ ID NO: 5051 - DNA, 20 bp, Artificial Sequence
  Description of Artificial Sequence:  Hypothetical Probe Sequence
tgcgaccttctgtacagtgc

SEQ ID NO: 5052 - DNA, 20 bp, Artificial Sequence
  Description of Artificial Sequence:  Hypothetical Probe Sequence
tgcgatcggtgcgagtttga

SEQ ID NO: 5053 - DNA, 20 bp, Artificial Sequence
  Description of Artificial Sequence:  Hypothetical Probe Sequence
tgcgcctattagagccgtgc

SEQ ID NO: 5054 - DNA, 20 bp, Artificial Sequence
  Description of Artificial Sequence:  Hypothetical Probe Sequence
tgcgcctaaatcctgtcttg

SEQ ID NO: 5055 - DNA, 20 bp, Artificial Sequence
  Description of Artificial Sequence:  Hypothetical Probe Sequence
tgcgcctaagtgcgaaacct

SEQ ID NO: 5056 - DNA, 20 bp, Artificial Sequence
  Description of Artificial Sequence:  Hypothetical Probe Sequence
tgcggatgaggattgatcgt

SEQ ID NO: 5057 - DNA, 20 bp, Artificial Sequence
  Description of Artificial Sequence:  Hypothetical Probe Sequence
tgcgtcccatactgatgtgc

SEQ ID NO: 5058 - DNA, 20 bp, Artificial Sequence
  Description of Artificial Sequence:  Hypothetical Probe Sequence
tgcgtcccaggagtgcttag

SEQ ID NO: 5059 - DNA, 20 bp, Artificial Sequence
  Description of Artificial Sequence:  Hypothetical Probe Sequence
tgcggaccttagctcaccat

SEQ ID NO: 5060 - DNA, 20 bp, Artificial Sequence
  Description of Artificial Sequence:  Hypothetical Probe Sequence
tgcggtgcagtgggtatctg

SEQ ID NO: 5061 - DNA, 20 bp, Artificial Sequence
  Description of Artificial Sequence:  Hypothetical Probe Sequence
tgcgggacggtaacggtgat

SEQ ID NO: 5062 - DNA, 20 bp, Artificial Sequence
  Description of Artificial Sequence:  Hypothetical Probe Sequence
tgcgacggaaagggtatgtc

SEQ ID NO: 5063 - DNA, 20 bp, Artificial Sequence
  Description of Artificial Sequence:  Hypothetical Probe Sequence
tgcgagccctgtttaggatg

SEQ ID NO: 5064 - DNA, 20 bp, Artificial Sequence
  Description of Artificial Sequence:  Hypothetical Probe Sequence
cacggagtgatgagcccttg

SEQ ID NO: 5065 - DNA, 20 bp, Artificial Sequence
  Description of Artificial Sequence:  Hypothetical Probe Sequence
gcaaatactctggagttgcg

SEQ ID NO: 5066 - DNA, 20 bp, Artificial Sequence
  Description of Artificial Sequence:  Hypothetical Probe Sequence
cacgatcggcaaatcgtcgt

SEQ ID NO: 5067 - DNA, 20 bp, Artificial Sequence
  Description of Artificial Sequence:  Hypothetical Probe Sequence
aggaagtggcaacacgcagc

SEQ ID NO: 5068 - DNA, 20 bp, Artificial Sequence
  Description of Artificial Sequence:  Hypothetical Probe Sequence
aggagaccctcacgaatgcg

SEQ ID NO: 5069 - DNA, 20 bp, Artificial Sequence
  Description of Artificial Sequence:  Hypothetical Probe Sequence
cacgcagcgcttgctttctg

SEQ ID NO: 5070 - DNA, 20 bp, Artificial Sequence
  Description of Artificial Sequence:  Hypothetical Probe Sequence
cacgagccggtacgttggta

SEQ ID NO: 5071 - DNA, 20 bp, Artificial Sequence
  Description of Artificial Sequence:  Hypothetical Probe Sequence
cagcatacgtgctcccagga

SEQ ID NO: 5072 - DNA, 20 bp, Artificial Sequence
  Description of Artificial Sequence:  Hypothetical Probe Sequence
cagcgagtccatggacagtg

SEQ ID NO: 5073 - DNA, 20 bp, Artificial Sequence
  Description of Artificial Sequence:  Hypothetical Probe Sequence
cagcgagtggtaatcgtccc

SEQ ID NO: 5074 - DNA, 20 bp, Artificial Sequence
  Description of Artificial Sequence:  Hypothetical Probe Sequence
agtgatcgcttgagcctgcg

SEQ ID NO: 5075 - DNA, 20 bp, Artificial Sequence
  Description of Artificial Sequence:  Hypothetical Probe Sequence
cagccagcaaagcctaagga

SEQ ID NO: 5076 - DNA, 20 bp, Artificial Sequence
  Description of Artificial Sequence:  Hypothetical Probe Sequence
cagccagctacaagccagga

SEQ ID NO: 5077 - DNA, 20 bp, Artificial Sequence
  Description of Artificial Sequence:  Hypothetical Probe Sequence
gcaaacctgtctatcgcgaa

SEQ ID NO: 5078 - DNA, 20 bp, Artificial Sequence
  Description of Artificial Sequence:  Hypothetical Probe Sequence
gatgcgaatacagacccgaa

SEQ ID NO: 5079 - DNA, 20 bp, Artificial Sequence
  Description of Artificial Sequence:  Hypothetical Probe Sequence
gatggagtgatggaccacgg

SEQ ID NO: 5080 - DNA, 20 bp, Artificial Sequence
  Description of Artificial Sequence:  Hypothetical Probe Sequence
tcccgcaagtctggaccgaa

SEQ ID NO: 5081 - DNA, 20 bp, Artificial Sequence
  Description of Artificial Sequence:  Hypothetical Probe Sequence
gtgcgcttcctaacgggatg

SEQ ID NO: 5082 - DNA, 20 bp, Artificial Sequence
  Description of Artificial Sequence:  Hypothetical Probe Sequence
gtgcgcaacgttgcttttag

SEQ ID NO: 5083 - DNA, 20 bp, Artificial Sequence
  Description of Artificial Sequence:  Hypothetical Probe Sequence
aggacctaagccatcgacgg

SEQ ID NO: 5084 - DNA, 20 bp, Artificial Sequence
  Description of Artificial Sequence:  Hypothetical Probe Sequence
cttgaggatgtcgatggcaa

SEQ ID NO: 5085 - DNA, 20 bp, Artificial Sequence
  Description of Artificial Sequence:  Hypothetical Probe Sequence
cagccgttttgagatgccat

SEQ ID NO: 5086 - DNA, 20 bp, Artificial Sequence
  Description of Artificial Sequence:  Hypothetical Probe Sequence
ttgattgaatcgcgtttgcg

SEQ ID NO: 5087 - DNA, 20 bp, Artificial Sequence
  Description of Artificial Sequence:  Hypothetical Probe Sequence
acggctcaggacatacccat

SEQ ID NO: 5088 - DNA, 20 bp, Artificial Sequence
  Description of Artificial Sequence:  Hypothetical Probe Sequence
acggctgtggtactcatcgt

SEQ ID NO: 5089 - DNA, 20 bp, Artificial Sequence
  Description of Artificial Sequence:  Hypothetical Probe Sequence
agtggcttgtctgaccagcc

SEQ ID NO: 5090 - DNA, 20 bp, Artificial Sequence
  Description of Artificial Sequence:  Hypothetical Probe Sequence
atcgtctgtctggacccgaa

SEQ ID NO: 5091 - DNA, 20 bp, Artificial Sequence
  Description of Artificial Sequence:  Hypothetical Probe Sequence
acggaggatgatacctcacg

SEQ ID NO: 5092 - DNA, 20 bp, Artificial Sequence
  Description of Artificial Sequence:  Hypothetical Probe Sequence
agccttagccattctgcgaa

SEQ ID NO: 5093 - DNA, 20 bp, Artificial Sequence
  Description of Artificial Sequence:  Hypothetical Probe Sequence
agcctgtcgcaaataccgtt

SEQ ID NO: 5094 - DNA, 20 bp, Artificial Sequence
  Description of Artificial Sequence:  Hypothetical Probe Sequence
agcctcgtttagtcgttgcg

SEQ ID NO: 5095 - DNA, 20 bp, Artificial Sequence
  Description of Artificial Sequence:  Hypothetical Probe Sequence
agccgtctggactgattctg

SEQ ID NO: 5096 - DNA, 20 bp, Artificial Sequence
  Description of Artificial Sequence:  Hypothetical Probe Sequence
agccgagtttagcctacacg

SEQ ID NO: 5097 - DNA, 20 bp, Artificial Sequence
  Description of Artificial Sequence:  Hypothetical Probe Sequence
tgcgtacactgtccattccc

SEQ ID NO: 5098 - DNA, 20 bp, Artificial Sequence
  Description of Artificial Sequence:  Hypothetical Probe Sequence
agccgaccagccttagggac

SEQ ID NO: 5099 - DNA, 20 bp, Artificial Sequence
  Description of Artificial Sequence:  Hypothetical Probe Sequence
ttgaagccatcggctttccc

SEQ ID NO: 5100 - DNA, 20 bp, Artificial Sequence
  Description of Artificial Sequence:  Hypothetical Probe Sequence
aatccacgtccccgaaacgg

SEQ ID NO: 5101 - DNA, 20 bp, Artificial Sequence
  Description of Artificial Sequence:  Hypothetical Probe Sequence
aaagcgttctcatgcgcgtt

SEQ ID NO: 5102 - DNA, 20 bp, Artificial Sequence
  Description of Artificial Sequence:  Hypothetical Probe Sequence
tcgtcagccacgacggacgg

SEQ ID NO: 5103 - DNA, 20 bp, Artificial Sequence
  Description of Artificial Sequence:  Hypothetical Probe Sequence
tcgtgtgcacggtgcgatcg

SEQ ID NO: 5104 - DNA, 20 bp, Artificial Sequence
  Description of Artificial Sequence:  Hypothetical Probe Sequence
cttgcgaagtgcgtgccgtt

SEQ ID NO: 5105 - DNA, 20 bp, Artificial Sequence
  Description of Artificial Sequence:  Hypothetical Probe Sequence
cgtttccccacgagtgcgtt

SEQ ID NO: 5106 - DNA, 20 bp, Artificial Sequence
  Description of Artificial Sequence:  Hypothetical Probe Sequence
ccatgtgcacggcacgccat

SEQ ID NO: 5107 - DNA, 20 bp, Artificial Sequence
  Description of Artificial Sequence:  Hypothetical Probe Sequence
cgaaacggctcacagccacg

SEQ ID NO: 5108 - DNA, 20 bp, Artificial Sequence
  Description of Artificial Sequence:  Hypothetical Probe Sequence
gctttcccggtatcccggac

SEQ ID NO: 5109 - DNA, 20 bp, Artificial Sequence
  Description of Artificial Sequence:  Hypothetical Probe Sequence
agtgcgaaatcggtgcacct

SEQ ID NO: 5110 - DNA, 20 bp, Artificial Sequence
  Description of Artificial Sequence:  Hypothetical Probe Sequence
acctcagccacgagccagga

SEQ ID NO: 5111 - DNA, 20 bp, Artificial Sequence
  Description of Artificial Sequence:  Hypothetical Probe Sequence
acctagcctgcgtcccgacc

SEQ ID NO: 5112 - DNA, 20 bp, Artificial Sequence
  Description of Artificial Sequence:  Hypothetical Probe Sequence
tcccaaaggcaaagccatcg

SEQ ID NO: 5113 - DNA, 20 bp, Artificial Sequence
  Description of Artificial Sequence:  Hypothetical Probe Sequence
tccctccccctacacgcgtt

SEQ ID NO: 5114 - DNA, 20 bp, Artificial Sequence
  Description of Artificial Sequence:  Hypothetical Probe Sequence
tgcgttgacagcggacgcaa

SEQ ID NO: 5115 - DNA, 20 bp, Artificial Sequence
  Description of Artificial Sequence:  Hypothetical Probe Sequence
tgcgcgaacctagatgcacg

SEQ ID NO: 5116 - DNA, 20 bp, Artificial Sequence
  Description of Artificial Sequence:  Hypothetical Probe Sequence
tgcgggtattagcacggacc

SEQ ID NO: 5117 - DNA, 20 bp, Artificial Sequence
  Description of Artificial Sequence:  Hypothetical Probe Sequence
tgcgagtgacgggtgctccc

SEQ ID NO: 5118 - DNA, 20 bp, Artificial Sequence
  Description of Artificial Sequence:  Hypothetical Probe Sequence
tgcgcctatctgacggcttg

SEQ ID NO: 5119 - DNA, 20 bp, Artificial Sequence
  Description of Artificial Sequence:  Hypothetical Probe Sequence
tgcggatgcagctacatgcg

SEQ ID NO: 5120 - DNA, 20 bp, Artificial Sequence
  Description of Artificial Sequence:  Hypothetical Probe Sequence
cacgcttgcacgatcggtgc

SEQ ID NO: 5121 - DNA, 20 bp, Artificial Sequence
  Description of Artificial Sequence:  Hypothetical Probe Sequence
cacggtgcccatctgttgcg

SEQ ID NO: 5122 - DNA, 20 bp, Artificial Sequence
  Description of Artificial Sequence:  Hypothetical Probe Sequence
cacgacggaaaggcaaatcg

SEQ ID NO: 5123 - DNA, 20 bp, Artificial Sequence
  Description of Artificial Sequence:  Hypothetical Probe Sequence
cagcagccagtggtgctccc

SEQ ID NO: 5124 - DNA, 20 bp, Artificial Sequence
  Description of Artificial Sequence:  Hypothetical Probe Sequence
ttgagacctgcgcagccgaa

SEQ ID NO: 5125 - DNA, 20 bp, Artificial Sequence
  Description of Artificial Sequence:  Hypothetical Probe Sequence
ggacacggtccctgtctgcg

SEQ ID NO: 5126 - DNA, 20 bp, Artificial Sequence
  Description of Artificial Sequence:  Hypothetical Probe Sequence
ttgaacggcttgcttgccat

SEQ ID NO: 5127 - DNA, 20 bp, Artificial Sequence
  Description of Artificial Sequence:  Hypothetical Probe Sequence
acgggagtacggcacgcttg

SEQ ID NO: 5128 - DNA, 20 bp, Artificial Sequence
  Description of Artificial Sequence:  Hypothetical Probe Sequence
agcccttgaggaacggggta

SEQ ID NO: 5129 - DNA, 20 bp, Artificial Sequence
  Description of Artificial Sequence:  Hypothetical Probe Sequence
ttgaagccctcaagccgcaa

SEQ ID NO: 5130 - DNA, 20 bp, Artificial Sequence
  Description of Artificial Sequence:  Hypothetical Probe Sequence
tgattgcggcaacttgcacg

SEQ ID NO: 5131 - DNA, 20 bp, Artificial Sequence
  Description of Artificial Sequence:  Hypothetical Probe Sequence
tctgccatggacacgggtgc

SEQ ID NO: 5132 - DNA, 20 bp, Artificial Sequence
  Description of Artificial Sequence:  Hypothetical Probe Sequence
tctgcagcaggaccattgcg

SEQ ID NO: 5133 - DNA, 20 bp, Artificial Sequence
  Description of Artificial Sequence:  Hypothetical Probe Sequence
tcgtcagccagcgtgcgatg

SEQ ID NO: 5134 - DNA, 20 bp, Artificial Sequence
  Description of Artificial Sequence:  Hypothetical Probe Sequence
cttgccattcccggaccagc

SEQ ID NO: 5135 - DNA, 20 bp, Artificial Sequence
  Description of Artificial Sequence:  Hypothetical Probe Sequence
cgaagcttagcccctatgcg

SEQ ID NO: 5136 - DNA, 20 bp, Artificial Sequence
  Description of Artificial Sequence:  Hypothetical Probe Sequence
ggtatgcgtcgttcgttccc

SEQ ID NO: 5137 - DNA, 20 bp, Artificial Sequence
  Description of Artificial Sequence:  Hypothetical Probe Sequence
gcaagatggatgtcccagcc

SEQ ID NO: 5138 - DNA, 20 bp, Artificial Sequence
  Description of Artificial Sequence:  Hypothetical Probe Sequence
gatggcaacagctcccccat

SEQ ID NO: 5139 - DNA, 20 bp, Artificial Sequence
  Description of Artificial Sequence:  Hypothetical Probe Sequence
gatgacgggacccacgtgcg

SEQ ID NO: 5140 - DNA, 20 bp, Artificial Sequence
  Description of Artificial Sequence:  Hypothetical Probe Sequence
tcccgagtagcccacgtcgt

SEQ ID NO: 5141 - DNA, 20 bp, Artificial Sequence
  Description of Artificial Sequence:  Hypothetical Probe Sequence
tcccgtgcaaagacggacct

SEQ ID NO: 5142 - DNA, 20 bp, Artificial Sequence
  Description of Artificial Sequence:  Hypothetical Probe Sequence
tgcggagtcttgacggggac

SEQ ID NO: 5143 - DNA, 20 bp, Artificial Sequence
  Description of Artificial Sequence:  Hypothetical Probe Sequence
tgcggatgaatcatcgtgcg

SEQ ID NO: 5144 - DNA, 20 bp, Artificial Sequence
  Description of Artificial Sequence:  Hypothetical Probe Sequence
cagcatcgtcccgcaaatcg

SEQ ID NO: 5145 - DNA, 20 bp, Artificial Sequence
  Description of Artificial Sequence:  Hypothetical Probe Sequence
gaccgatgcacgacgggcaa

SEQ ID NO: 5146 - DNA, 20 bp, Artificial Sequence
  Description of Artificial Sequence:  Hypothetical Probe Sequence
tgatgaccgtgcagccggta

SEQ ID NO: 5147 - DNA, 20 bp, Artificial Sequence
  Description of Artificial Sequence:  Hypothetical Probe Sequence
gtgctccctacatccctgcg

SEQ ID NO: 5148 - DNA, 20 bp, Artificial Sequence
  Description of Artificial Sequence:  Hypothetical Probe Sequence
gtgcggacgatgagccggta

SEQ ID NO: 5149 - DNA, 20 bp, Artificial Sequence
  Description of Artificial Sequence:  Hypothetical Probe Sequence
ggacggacatcggaccgctt

SEQ ID NO: 5150 - DNA, 20 bp, Artificial Sequence
  Description of Artificial Sequence:  Hypothetical Probe Sequence
acggtcgtcagccgtttgcg

SEQ ID NO: 5151 - DNA, 20 bp, Artificial Sequence
  Description of Artificial Sequence:  Hypothetical Probe Sequence
acggcttgcacgacggagga

SEQ ID NO: 5152 - DNA, 20 bp, Artificial Sequence
  Description of Artificial Sequence:  Hypothetical Probe Sequence
acggcgttttagcacgtgcg

SEQ ID NO: 5153 - DNA, 20 bp, Artificial Sequence
  Description of Artificial Sequence:  Hypothetical Probe Sequence
acggcctagatgacggcgtt

SEQ ID NO: 5154 - DNA, 20 bp, Artificial Sequence
  Description of Artificial Sequence:  Hypothetical Probe Sequence
cttggcaactcacagcgcaa

SEQ ID NO: 5155 - DNA, 20 bp, Artificial Sequence
  Description of Artificial Sequence:  Hypothetical Probe Sequence
cgttagcctctgcagcgcaa

SEQ ID NO: 5156 - DNA, 20 bp, Artificial Sequence
  Description of Artificial Sequence:  Hypothetical Probe Sequence
ccatagccttgaagccggac

SEQ ID NO: 5157 - DNA, 20 bp, Artificial Sequence
  Description of Artificial Sequence:  Hypothetical Probe Sequence
cgaaacctagccagccccta

SEQ ID NO: 5158 - DNA, 20 bp, Artificial Sequence
  Description of Artificial Sequence:  Hypothetical Probe Sequence
aggatgcgctcatccccgtt

SEQ ID NO: 5159 - DNA, 20 bp, Artificial Sequence
  Description of Artificial Sequence:  Hypothetical Probe Sequence
gatgcgaacacggatgtgcg

SEQ ID NO: 5160 - DNA, 20 bp, Artificial Sequence
  Description of Artificial Sequence:  Hypothetical Probe Sequence
tccccgttcgaagatgcgaa

SEQ ID NO: 5161 - DNA, 20 bp, Artificial Sequence
  Description of Artificial Sequence:  Hypothetical Probe Sequence
tcccatcgacggtgcgggta

SEQ ID NO: 5162 - DNA, 20 bp, Artificial Sequence
  Description of Artificial Sequence:  Hypothetical Probe Sequence
tcccagcccgaaagcccagc

SEQ ID NO: 5163 - DNA, 20 bp, Artificial Sequence
  Description of Artificial Sequence:  Hypothetical Probe Sequence
tgcgcttgtgcggtgcatcg

SEQ ID NO: 5164 - DNA, 20 bp, Artificial Sequence
  Description of Artificial Sequence:  Hypothetical Probe Sequence
cagccctatctgcagcgacc

SEQ ID NO: 5165 - DNA, 20 bp, Artificial Sequence
  Description of Artificial Sequence:  Hypothetical Probe Sequence
cagcacggtacacacggctt

SEQ ID NO: 5166 - DNA, 20 bp, Artificial Sequence
  Description of Artificial Sequence:  Hypothetical Probe Sequence
gaccgatggcttcacgtgcg

SEQ ID NO: 5167 - DNA, 20 bp, Artificial Sequence
  Description of Artificial Sequence:  Hypothetical Probe Sequence
gtgcgaccgtgccgtttgat

SEQ ID NO: 5168 - DNA, 20 bp, Artificial Sequence
  Description of Artificial Sequence:  Hypothetical Probe Sequence
ggacatcgcctaagcccgaa

SEQ ID NO: 5169 - DNA, 20 bp, Artificial Sequence
  Description of Artificial Sequence:  Hypothetical Probe Sequence
ggaccctatccccgaatccc

SEQ ID NO: 5170 - DNA, 20 bp, Artificial Sequence
  Description of Artificial Sequence:  Hypothetical Probe Sequence
ggactccctctgacggcagc

SEQ ID NO: 5171 - DNA, 20 bp, Artificial Sequence
  Description of Artificial Sequence:  Hypothetical Probe Sequence
ggaccacgtcgtatcgagcc

SEQ ID NO: 5172 - DNA, 20 bp, Artificial Sequence
  Description of Artificial Sequence:  Hypothetical Probe Sequence
acggatcgatcgagccggac

SEQ ID NO: 5173 - DNA, 20 bp, Artificial Sequence
  Description of Artificial Sequence:  Hypothetical Probe Sequence
acggaggaacggcacggcaa

SEQ ID NO: 5174 - DNA, 20 bp, Artificial Sequence
  Description of Artificial Sequence:  Hypothetical Probe Sequence
agccgcaagagtgtgccacg

SEQ ID NO: 5175 - DNA, 20 bp, Artificial Sequence
  Description of Artificial Sequence:  Hypothetical Probe Sequence
aaagcgtttcccagcccttg

SEQ ID NO: 5176 - DNA, 20 bp, Artificial Sequence
  Description of Artificial Sequence:  Hypothetical Probe Sequence
cgttgcaactgtagcccacg

SEQ ID NO: 5177 - DNA, 20 bp, Artificial Sequence
  Description of Artificial Sequence:  Hypothetical Probe Sequence
ctcaacggtcccatacacgg

SEQ ID NO: 5178 - DNA, 20 bp, Artificial Sequence
  Description of Artificial Sequence:  Hypothetical Probe Sequence
cgaaaatcagcctgcgcgtt

SEQ ID NO: 5179 - DNA, 20 bp, Artificial Sequence
  Description of Artificial Sequence:  Hypothetical Probe Sequence
cgaaaaaggatgcgaatgcg

SEQ ID NO: 5180 - DNA, 20 bp, Artificial Sequence
  Description of Artificial Sequence:  Hypothetical Probe Sequence
cgaactcaacgggcaagtgc

SEQ ID NO: 5181 - DNA, 20 bp, Artificial Sequence
  Description of Artificial Sequence:  Hypothetical Probe Sequence
cgaaagtgcacgcacggtgc

SEQ ID NO: 5182 - DNA, 20 bp, Artificial Sequence
  Description of Artificial Sequence:  Hypothetical Probe Sequence
ggtagcaaaaagggacgcaa

SEQ ID NO: 5183 - DNA, 20 bp, Artificial Sequence
  Description of Artificial Sequence:  Hypothetical Probe Sequence
cctatgcgtgtcatcggctt

SEQ ID NO: 5184 - DNA, 20 bp, Artificial Sequence
  Description of Artificial Sequence:  Hypothetical Probe Sequence
tcccgtctcgaagacccgaa

SEQ ID NO: 5185 - DNA, 20 bp, Artificial Sequence
  Description of Artificial Sequence:  Hypothetical Probe Sequence
tgcggctttacaggacgctt

SEQ ID NO: 5186 - DNA, 20 bp, Artificial Sequence
  Description of Artificial Sequence:  Hypothetical Probe Sequence
tgcgaggagacctcccacgg

SEQ ID NO: 5187 - DNA, 20 bp, Artificial Sequence
  Description of Artificial Sequence:  Hypothetical Probe Sequence
tgcggaccggtatcccacct

SEQ ID NO: 5188 - DNA, 20 bp, Artificial Sequence
  Description of Artificial Sequence:  Hypothetical Probe Sequence
tgcggtgctctgacggtcgt

SEQ ID NO: 5189 - DNA, 20 bp, Artificial Sequence
  Description of Artificial Sequence:  Hypothetical Probe Sequence
cacgtcgtacgggcaacagc

SEQ ID NO: 5190 - DNA, 20 bp, Artificial Sequence
  Description of Artificial Sequence:  Hypothetical Probe Sequence
cagccttgcttgggacggac

SEQ ID NO: 5191 - DNA, 20 bp, Artificial Sequence
  Description of Artificial Sequence:  Hypothetical Probe Sequence
cagccctaaggaggacagcc

SEQ ID NO: 5192 - DNA, 20 bp, Artificial Sequence
  Description of Artificial Sequence:  Hypothetical Probe Sequence
aatccagctgcgcgttcgaa

SEQ ID NO: 5193 - DNA, 20 bp, Artificial Sequence
  Description of Artificial Sequence:  Hypothetical Probe Sequence
cagcacgggtctagccgatg

SEQ ID NO: 5194 - DNA, 20 bp, Artificial Sequence
  Description of Artificial Sequence:  Hypothetical Probe Sequence
gaccaatcgcttgaccgcaa

SEQ ID NO: 5195 - DNA, 20 bp, Artificial Sequence
  Description of Artificial Sequence:  Hypothetical Probe Sequence
gaccccatcgttagtgtgcg

SEQ ID NO: 5196 - DNA, 20 bp, Artificial Sequence
  Description of Artificial Sequence:  Hypothetical Probe Sequence
gacccctaacggaaagcgtt

SEQ ID NO: 5197 - DNA, 20 bp, Artificial Sequence
  Description of Artificial Sequence:  Hypothetical Probe Sequence
gaccgatgccattcgtcgaa

SEQ ID NO: 5198 - DNA, 20 bp, Artificial Sequence
  Description of Artificial Sequence:  Hypothetical Probe Sequence
gaccggacaggatgattgcg

SEQ ID NO: 5199 - DNA, 20 bp, Artificial Sequence
  Description of Artificial Sequence:  Hypothetical Probe Sequence
gtgcctcaataccagcacgg

SEQ ID NO: 5200 - DNA, 20 bp, Artificial Sequence
  Description of Artificial Sequence:  Hypothetical Probe Sequence
gtgcgatgcagcgtctgcaa

SEQ ID NO: 5201 - DNA, 20 bp, Artificial Sequence
  Description of Artificial Sequence:  Hypothetical Probe Sequence
ggacagccaggaatcgatcg

SEQ ID NO: 5202 - DNA, 20 bp, Artificial Sequence
  Description of Artificial Sequence:  Hypothetical Probe Sequence
acggctcactcatcccctca

SEQ ID NO: 5203 - DNA, 20 bp, Artificial Sequence
  Description of Artificial Sequence:  Hypothetical Probe Sequence
acggacctctcaagccgacc

SEQ ID NO: 5204 - DNA, 20 bp, Artificial Sequence
  Description of Artificial Sequence:  Hypothetical Probe Sequence
acgggatgcgaacgaagtgc

SEQ ID NO: 5205 - DNA, 20 bp, Artificial Sequence
  Description of Artificial Sequence:  Hypothetical Probe Sequence
agcccgttaaagtgcggatg

SEQ ID NO: 5206 - DNA, 20 bp, Artificial Sequence
  Description of Artificial Sequence:  Hypothetical Probe Sequence
agccctcaatcgcagcagcc

SEQ ID NO: 5207 - DNA, 20 bp, Artificial Sequence
  Description of Artificial Sequence:  Hypothetical Probe Sequence
agccggtaccatagcctgcg

SEQ ID NO: 5208 - DNA, 20 bp, Artificial Sequence
  Description of Artificial Sequence:  Hypothetical Probe Sequence
agccaggatgtccctatgcg

SEQ ID NO: 5209 - DNA, 20 bp, Artificial Sequence
  Description of Artificial Sequence:  Hypothetical Probe Sequence
ccatcgaaggactgcgcagc

SEQ ID NO: 5210 - DNA, 20 bp, Artificial Sequence
  Description of Artificial Sequence:  Hypothetical Probe Sequence
gcaaacggctcatcccggta

SEQ ID NO: 5211 - DNA, 20 bp, Artificial Sequence
  Description of Artificial Sequence:  Hypothetical Probe Sequence
cctaacggcagctgcgctgt

SEQ ID NO: 5212 - DNA, 20 bp, Artificial Sequence
  Description of Artificial Sequence:  Hypothetical Probe Sequence
gatgacggcagctcccgcaa

SEQ ID NO: 5213 - DNA, 20 bp, Artificial Sequence
  Description of Artificial Sequence:  Hypothetical Probe Sequence
tgcgctgttccccacgagcc

SEQ ID NO: 5214 - DNA, 20 bp, Artificial Sequence
  Description of Artificial Sequence:  Hypothetical Probe Sequence
tgcgcgaattaggcaaagcc

SEQ ID NO: 5215 - DNA, 20 bp, Artificial Sequence
  Description of Artificial Sequence:  Hypothetical Probe Sequence
cacgatcgtccccgaacgaa

SEQ ID NO: 5216 - DNA, 20 bp, Artificial Sequence
  Description of Artificial Sequence:  Hypothetical Probe Sequence
cagcggaccctaagccagcc

SEQ ID NO: 5217 - DNA, 20 bp, Artificial Sequence
  Description of Artificial Sequence:  Hypothetical Probe Sequence
gaccgagttgcgtcccgatg

SEQ ID NO: 5218 - DNA, 20 bp, Artificial Sequence
  Description of Artificial Sequence:  Hypothetical Probe Sequence
gtgctgcgggtaccatggac

SEQ ID NO: 5219 - DNA, 20 bp, Artificial Sequence
  Description of Artificial Sequence:  Hypothetical Probe Sequence
gtgccacgatcgcttgtccc

SEQ ID NO: 5220 - DNA, 20 bp, Artificial Sequence
  Description of Artificial Sequence:  Hypothetical Probe Sequence
ggacgacctgtcggacgcaa

SEQ ID NO: 5221 - DNA, 20 bp, Artificial Sequence
  Description of Artificial Sequence:  Hypothetical Probe Sequence
acggcctaacggtgtccgtt

SEQ ID NO: 5222 - DNA, 20 bp, Artificial Sequence
  Description of Artificial Sequence:  Hypothetical Probe Sequence
acggtccccgttggaccagc

SEQ ID NO: 5223 - DNA, 20 bp, Artificial Sequence
  Description of Artificial Sequence:  Hypothetical Probe Sequence
agcccgaacagctccctcgt

SEQ ID NO: 5224 - DNA, 20 bp, Artificial Sequence
  Description of Artificial Sequence:  Hypothetical Probe Sequence
tcgtagccatcgcacgcagc

SEQ ID NO: 5225 - DNA, 20 bp, Artificial Sequence
  Description of Artificial Sequence:  Hypothetical Probe Sequence
cgttttgacgttagcctgcg

SEQ ID NO: 5226 - DNA, 20 bp, Artificial Sequence
  Description of Artificial Sequence:  Hypothetical Probe Sequence
aaagcgttatcgtcccgacc

SEQ ID NO: 5227 - DNA, 20 bp, Artificial Sequence
  Description of Artificial Sequence:  Hypothetical Probe Sequence
cgttgaccgatgacggccat

SEQ ID NO: 5228 - DNA, 20 bp, Artificial Sequence
  Description of Artificial Sequence:  Hypothetical Probe Sequence
aaagccatgctttccctccc

SEQ ID NO: 5229 - DNA, 20 bp, Artificial Sequence
  Description of Artificial Sequence:  Hypothetical Probe Sequence
cgaatcgttcgtcttgcacg

SEQ ID NO: 5230 - DNA, 20 bp, Artificial Sequence
  Description of Artificial Sequence:  Hypothetical Probe Sequence
cgaacgaagatgccatcagc

SEQ ID NO: 5231 - DNA, 20 bp, Artificial Sequence
  Description of Artificial Sequence:  Hypothetical Probe Sequence
cgaacagcgacccctacagc

SEQ ID NO: 5232 - DNA, 20 bp, Artificial Sequence
  Description of Artificial Sequence:  Hypothetical Probe Sequence
gcttatcgtgcgtcgtgctt

SEQ ID NO: 5233 - DNA, 20 bp, Artificial Sequence
  Description of Artificial Sequence:  Hypothetical Probe Sequence
gcaaaaagtgtccagcggac

SEQ ID NO: 5234 - DNA, 20 bp, Artificial Sequence
  Description of Artificial Sequence:  Hypothetical Probe Sequence
gcaatcgttgtcggtatgcg

SEQ ID NO: 5235 - DNA, 20 bp, Artificial Sequence
  Description of Artificial Sequence:  Hypothetical Probe Sequence
gcaaagtgcgaacacggcaa

SEQ ID NO: 5236 - DNA, 20 bp, Artificial Sequence
  Description of Artificial Sequence:  Hypothetical Probe Sequence
aaaggcaacagcgcaagcaa

SEQ ID NO: 5237 - DNA, 20 bp, Artificial Sequence
  Description of Artificial Sequence:  Hypothetical Probe Sequence
atcggcaaaaagtccccgaa

SEQ ID NO: 5238 - DNA, 20 bp, Artificial Sequence
  Description of Artificial Sequence:  Hypothetical Probe Sequence
atcgcagcgcttgatgtgcg

SEQ ID NO: 5239 - DNA, 20 bp, Artificial Sequence
  Description of Artificial Sequence:  Hypothetical Probe Sequence
gatgctcaagcccagcacgg

SEQ ID NO: 5240 - DNA, 20 bp, Artificial Sequence
  Description of Artificial Sequence:  Hypothetical Probe Sequence
aaagtcccgagttgcgtgcg

SEQ ID NO: 5241 - DNA, 20 bp, Artificial Sequence
  Description of Artificial Sequence:  Hypothetical Probe Sequence
tgcgagccatcgacctacgg

SEQ ID NO: 5242 - DNA, 20 bp, Artificial Sequence
  Description of Artificial Sequence:  Hypothetical Probe Sequence
cacggcttggtagtgcgacc

SEQ ID NO: 5243 - DNA, 20 bp, Artificial Sequence
  Description of Artificial Sequence:  Hypothetical Probe Sequence
cacggcaatgatcacggacc

SEQ ID NO: 5244 - DNA, 20 bp, Artificial Sequence
  Description of Artificial Sequence:  Hypothetical Probe Sequence
cacgagtgggacgtgcatcg

SEQ ID NO: 5245 - DNA, 20 bp, Artificial Sequence
  Description of Artificial Sequence:  Hypothetical Probe Sequence
cagcgcttggtaatcgggta

SEQ ID NO: 5246 - DNA, 20 bp, Artificial Sequence
  Description of Artificial Sequence:  Hypothetical Probe Sequence
gaccggtaaaagcgaagcaa

SEQ ID NO: 5247 - DNA, 20 bp, Artificial Sequence
  Description of Artificial Sequence:  Hypothetical Probe Sequence
gtgctcgtcagcagtgcgtt

SEQ ID NO: 5248 - DNA, 20 bp, Artificial Sequence
  Description of Artificial Sequence:  Hypothetical Probe Sequence
gtgccttggtgcgatgccta

SEQ ID NO: 5249 - DNA, 20 bp, Artificial Sequence
  Description of Artificial Sequence:  Hypothetical Probe Sequence
gtgcctcatgtcacgggtgc

SEQ ID NO: 5250 - DNA, 20 bp, Artificial Sequence
  Description of Artificial Sequence:  Hypothetical Probe Sequence
aaaggtgccgaaatcgggac

SEQ ID NO: 5251 - DNA, 20 bp, Artificial Sequence
  Description of Artificial Sequence:  Hypothetical Probe Sequence
gtgccagcggtaggaccagc

SEQ ID NO: 5252 - DNA, 20 bp, Artificial Sequence
  Description of Artificial Sequence:  Hypothetical Probe Sequence
ggacttgaacgggcttgcaa

SEQ ID NO: 5253 - DNA, 20 bp, Artificial Sequence
  Description of Artificial Sequence:  Hypothetical Probe Sequence
ggacctcagcaaagccccat

SEQ ID NO: 5254 - DNA, 20 bp, Artificial Sequence
  Description of Artificial Sequence:  Hypothetical Probe Sequence
ggacccatgcttccatgacc

SEQ ID NO: 5255 - DNA, 20 bp, Artificial Sequence
  Description of Artificial Sequence:  Hypothetical Probe Sequence
acggtctggcttacgggtgc

SEQ ID NO: 5256 - DNA, 20 bp, Artificial Sequence
  Description of Artificial Sequence:  Hypothetical Probe Sequence
acggcgttgtgcaaagtccc

SEQ ID NO: 5257 - DNA, 20 bp, Artificial Sequence
  Description of Artificial Sequence:  Hypothetical Probe Sequence
acggatcgcacgcctagcaa

SEQ ID NO: 5258 - DNA, 20 bp, Artificial Sequence
  Description of Artificial Sequence:  Hypothetical Probe Sequence
agccgagtggacatcgtgcg

SEQ ID NO: 5259 - DNA, 20 bp, Artificial Sequence
  Description of Artificial Sequence:  Hypothetical Probe Sequence
agccagtgacggccatcacg

SEQ ID NO: 5260 - DNA, 20 bp, Artificial Sequence
  Description of Artificial Sequence:  Hypothetical Probe Sequence
tccccgaaggtaacggcagc

SEQ ID NO: 5261 - DNA, 20 bp, Artificial Sequence
  Description of Artificial Sequence:  Hypothetical Probe Sequence
tcccatcggagttcccgacc

SEQ ID NO: 5262 - DNA, 20 bp, Artificial Sequence
  Description of Artificial Sequence:  Hypothetical Probe Sequence
tgcgggacgagtgacccacg

SEQ ID NO: 5263 - DNA, 20 bp, Artificial Sequence
  Description of Artificial Sequence:  Hypothetical Probe Sequence
cagctgcgtacatgcgccat

SEQ ID NO: 5264 - DNA, 20 bp, Artificial Sequence
  Description of Artificial Sequence:  Hypothetical Probe Sequence
gaccgcaacgaaagcctccc

SEQ ID NO: 5265 - DNA, 20 bp, Artificial Sequence
  Description of Artificial Sequence:  Hypothetical Probe Sequence
gtgcacgggcaagaccgtgc

SEQ ID NO: 5266 - DNA, 20 bp, Artificial Sequence
  Description of Artificial Sequence:  Hypothetical Probe Sequence
acggtcgtatcgcttgccat

SEQ ID NO: 5267 - DNA, 20 bp, Artificial Sequence
  Description of Artificial Sequence:  Hypothetical Probe Sequence
acggcttgctcagaccgcaa

SEQ ID NO: 5268 - DNA, 20 bp, Artificial Sequence
  Description of Artificial Sequence:  Hypothetical Probe Sequence
acgggagttgcgcagcctca

SEQ ID NO: 5269 - DNA, 20 bp, Artificial Sequence
  Description of Artificial Sequence:  Hypothetical Probe Sequence
acggacctgatgcagcgcaa

SEQ ID NO: 5270 - DNA, 20 bp, Artificial Sequence
  Description of Artificial Sequence:  Hypothetical Probe Sequence
tacaacggcacgtgcgacct

SEQ ID NO: 5271 - DNA, 20 bp, Artificial Sequence
  Description of Artificial Sequence:  Hypothetical Probe Sequence
agccgcaagtcttgcgttga

SEQ ID NO: 5272 - DNA, 20 bp, Artificial Sequence
  Description of Artificial Sequence:  Hypothetical Probe Sequence
agccatcgcagccttggcaa

SEQ ID NO: 5273 - DNA, 20 bp, Artificial Sequence
  Description of Artificial Sequence:  Hypothetical Probe Sequence
tctgcgtttgcggcaaagcc

SEQ ID NO: 5274 - DNA, 20 bp, Artificial Sequence
  Description of Artificial Sequence:  Hypothetical Probe Sequence
tctgcgaatgcggaccgtct

SEQ ID NO: 5275 - DNA, 20 bp, Artificial Sequence
  Description of Artificial Sequence:  Hypothetical Probe Sequence
tctgtcgtgcttgaccagcc

SEQ ID NO: 5276 - DNA, 20 bp, Artificial Sequence
  Description of Artificial Sequence:  Hypothetical Probe Sequence
cttgcgttgctttgtccgtt

SEQ ID NO: 5277 - DNA, 20 bp, Artificial Sequence
  Description of Artificial Sequence:  Hypothetical Probe Sequence
cgttttgagtgcagcccagc

SEQ ID NO: 5278 - DNA, 20 bp, Artificial Sequence
  Description of Artificial Sequence:  Hypothetical Probe Sequence
tctgcgttcgttcttgcgaa

SEQ ID NO: 5279 - DNA, 20 bp, Artificial Sequence
  Description of Artificial Sequence:  Hypothetical Probe Sequence
cgttgatgaggacagctgcg

SEQ ID NO: 5280 - DNA, 20 bp, Artificial Sequence
  Description of Artificial Sequence:  Hypothetical Probe Sequence
ctcagcaaacctgtgcacgg

SEQ ID NO: 5281 - DNA, 20 bp, Artificial Sequence
  Description of Artificial Sequence:  Hypothetical Probe Sequence
ctcacagcacgggtgcgatg

SEQ ID NO: 5282 - DNA, 20 bp, Artificial Sequence
  Description of Artificial Sequence:  Hypothetical Probe Sequence
ctgtcacggacccagccgtt

SEQ ID NO: 5283 - DNA, 20 bp, Artificial Sequence
  Description of Artificial Sequence:  Hypothetical Probe Sequence
tctgccatcgaaagtggtgc

SEQ ID NO: 5284 - DNA, 20 bp, Artificial Sequence
  Description of Artificial Sequence:  Hypothetical Probe Sequence
ccatggtacgtttgcggacc

SEQ ID NO: 5285 - DNA, 20 bp, Artificial Sequence
  Description of Artificial Sequence:  Hypothetical Probe Sequence
ccattcccatcgtctgcacg

SEQ ID NO: 5286 - DNA, 20 bp, Artificial Sequence
  Description of Artificial Sequence:  Hypothetical Probe Sequence
cgaatctgcgtttgattgcg

SEQ ID NO: 5287 - DNA, 20 bp, Artificial Sequence
  Description of Artificial Sequence:  Hypothetical Probe Sequence
cgaaagtgacggagcccgtt

SEQ ID NO: 5288 - DNA, 20 bp, Artificial Sequence
  Description of Artificial Sequence:  Hypothetical Probe Sequence
cgaagtgccttgtcgttccc

SEQ ID NO: 5289 - DNA, 20 bp, Artificial Sequence
  Description of Artificial Sequence:  Hypothetical Probe Sequence
tctggcttaggaacgggctt

SEQ ID NO: 5290 - DNA, 20 bp, Artificial Sequence
  Description of Artificial Sequence:  Hypothetical Probe Sequence
gctttgcgaatccttggctt

SEQ ID NO: 5291 - DNA, 20 bp, Artificial Sequence
  Description of Artificial Sequence:  Hypothetical Probe Sequence
tctggcttgaccgacccgaa

SEQ ID NO: 5292 - DNA, 20 bp, Artificial Sequence
  Description of Artificial Sequence:  Hypothetical Probe Sequence
ggtatccccgaatgtccacg

SEQ ID NO: 5293 - DNA, 20 bp, Artificial Sequence
  Description of Artificial Sequence:  Hypothetical Probe Sequence
gcaatgatatcgcacggtgc

SEQ ID NO: 5294 - DNA, 20 bp, Artificial Sequence
  Description of Artificial Sequence:  Hypothetical Probe Sequence
tctggcaaaaaggctttccc

SEQ ID NO: 5295 - DNA, 20 bp, Artificial Sequence
  Description of Artificial Sequence:  Hypothetical Probe Sequence
gcaactgtcagcgcttcgaa

SEQ ID NO: 5296 - DNA, 20 bp, Artificial Sequence
  Description of Artificial Sequence:  Hypothetical Probe Sequence
gcaaggtatctgcagccagc

SEQ ID NO: 5297 - DNA, 20 bp, Artificial Sequence
  Description of Artificial Sequence:  Hypothetical Probe Sequence
agtggcaatccctccctgcg

SEQ ID NO: 5298 - DNA, 20 bp, Artificial Sequence
  Description of Artificial Sequence:  Hypothetical Probe Sequence
atcggtgctgcgaatcgtgc

SEQ ID NO: 5299 - DNA, 20 bp, Artificial Sequence
  Description of Artificial Sequence:  Hypothetical Probe Sequence
cctacagccgaatcccgctt

SEQ ID NO: 5300 - DNA, 20 bp, Artificial Sequence
  Description of Artificial Sequence:  Hypothetical Probe Sequence
tctggatgccatgtgccgaa

SEQ ID NO: 5301 - DNA, 20 bp, Artificial Sequence
  Description of Artificial Sequence:  Hypothetical Probe Sequence
tctggatgcgaaaaagtgcg

SEQ ID NO: 5302 - DNA, 20 bp, Artificial Sequence
  Description of Artificial Sequence:  Hypothetical Probe Sequence
tctggatgggacggtatgcg

SEQ ID NO: 5303 - DNA, 20 bp, Artificial Sequence
  Description of Artificial Sequence:  Hypothetical Probe Sequence
tcccccattcgtgatggtgc

SEQ ID NO: 5304 - DNA, 20 bp, Artificial Sequence
  Description of Artificial Sequence:  Hypothetical Probe Sequence
tcccgctttctggatgtgcg

SEQ ID NO: 5305 - DNA, 20 bp, Artificial Sequence
  Description of Artificial Sequence:  Hypothetical Probe Sequence
tcccggtaccatatcgcgaa

SEQ ID NO: 5306 - DNA, 20 bp, Artificial Sequence
  Description of Artificial Sequence:  Hypothetical Probe Sequence
tcccgagtggacgcaaccat

SEQ ID NO: 5307 - DNA, 20 bp, Artificial Sequence
  Description of Artificial Sequence:  Hypothetical Probe Sequence
tcccagcccctatcccacct

SEQ ID NO: 5308 - DNA, 20 bp, Artificial Sequence
  Description of Artificial Sequence:  Hypothetical Probe Sequence
tgcgtctgtccccgaagcaa

SEQ ID NO: 5309 - DNA, 20 bp, Artificial Sequence
  Description of Artificial Sequence:  Hypothetical Probe Sequence
tgcgtgcggatgacctacgg

SEQ ID NO: 5310 - DNA, 20 bp, Artificial Sequence
  Description of Artificial Sequence:  Hypothetical Probe Sequence
tgcggacctcgttgatcacg

SEQ ID NO: 5311 - DNA, 20 bp, Artificial Sequence
  Description of Artificial Sequence:  Hypothetical Probe Sequence
tctgcacgcttgttagcagc

SEQ ID NO: 5312 - DNA, 20 bp, Artificial Sequence
  Description of Artificial Sequence:  Hypothetical Probe Sequence
tctgcacgccatgtgccgtt

SEQ ID NO: 5313 - DNA, 20 bp, Artificial Sequence
  Description of Artificial Sequence:  Hypothetical Probe Sequence
cacggagttgtcggacgtgc

SEQ ID NO: 5314 - DNA, 20 bp, Artificial Sequence
  Description of Artificial Sequence:  Hypothetical Probe Sequence
tctgcacgcctaagccctgt

SEQ ID NO: 5315 - DNA, 20 bp, Artificial Sequence
  Description of Artificial Sequence:  Hypothetical Probe Sequence
cacggatgacggacctcgaa

SEQ ID NO: 5316 - DNA, 20 bp, Artificial Sequence
  Description of Artificial Sequence:  Hypothetical Probe Sequence
cagcctgtggtacacgcgtt

SEQ ID NO: 5317 - DNA, 20 bp, Artificial Sequence
  Description of Artificial Sequence:  Hypothetical Probe Sequence
cagccgaagcttgcaaacgg

SEQ ID NO: 5318 - DNA, 20 bp, Artificial Sequence
  Description of Artificial Sequence:  Hypothetical Probe Sequence
tctgcagcgtgcgcaaagcc

SEQ ID NO: 5319 - DNA, 20 bp, Artificial Sequence
  Description of Artificial Sequence:  Hypothetical Probe Sequence
tctggacctgcgccatctca

SEQ ID NO: 5320 - DNA, 20 bp, Artificial Sequence
  Description of Artificial Sequence:  Hypothetical Probe Sequence
gacccacggacctgtccagc

SEQ ID NO: 5321 - DNA, 20 bp, Artificial Sequence
  Description of Artificial Sequence:  Hypothetical Probe Sequence
tctggaccgaccagtgcgtt

SEQ ID NO: 5322 - DNA, 20 bp, Artificial Sequence
  Description of Artificial Sequence:  Hypothetical Probe Sequence
gtgctcgtctgtgtgcacgg

SEQ ID NO: 5323 - DNA, 20 bp, Artificial Sequence
  Description of Artificial Sequence:  Hypothetical Probe Sequence
tctggtgcggtacagcctca

SEQ ID NO: 5324 - DNA, 20 bp, Artificial Sequence
  Description of Artificial Sequence:  Hypothetical Probe Sequence
gtgcatcgggacatcggtgc

SEQ ID NO: 5325 - DNA, 20 bp, Artificial Sequence
  Description of Artificial Sequence:  Hypothetical Probe Sequence
ggaccgttgtctagcccgtt

SEQ ID NO: 5326 - DNA, 20 bp, Artificial Sequence
  Description of Artificial Sequence:  Hypothetical Probe Sequence
ggaccctaatcgacggcgtt

SEQ ID NO: 5327 - DNA, 20 bp, Artificial Sequence
  Description of Artificial Sequence:  Hypothetical Probe Sequence
acgggagtgcaacacggacc

SEQ ID NO: 5328 - DNA, 20 bp, Artificial Sequence
  Description of Artificial Sequence:  Hypothetical Probe Sequence
acgggcaacttgatcgctca

SEQ ID NO: 5329 - DNA, 20 bp, Artificial Sequence
  Description of Artificial Sequence:  Hypothetical Probe Sequence
acgggatgacctagccgatg

SEQ ID NO: 5330 - DNA, 20 bp, Artificial Sequence
  Description of Artificial Sequence:  Hypothetical Probe Sequence
acggacgggcttagtgtgcg

SEQ ID NO: 5331 - DNA, 20 bp, Artificial Sequence
  Description of Artificial Sequence:  Hypothetical Probe Sequence
agccaaaggtgcccatcgtt

SEQ ID NO: 5332 - DNA, 20 bp, Artificial Sequence
  Description of Artificial Sequence:  Hypothetical Probe Sequence
tctgagccgcaaggtaacgg

SEQ ID NO: 5333 - DNA, 20 bp, Artificial Sequence
  Description of Artificial Sequence:  Hypothetical Probe Sequence
ttgaagccccattgcgccta

SEQ ID NO: 5334 - DNA, 20 bp, Artificial Sequence
  Description of Artificial Sequence:  Hypothetical Probe Sequence
aatccagcgtgctgcgtgcg

SEQ ID NO: 5335 - DNA, 20 bp, Artificial Sequence
  Description of Artificial Sequence:  Hypothetical Probe Sequence
aatcacggagcccacgggac

SEQ ID NO: 5336 - DNA, 20 bp, Artificial Sequence
  Description of Artificial Sequence:  Hypothetical Probe Sequence
aatcagccagcccagctccc

SEQ ID NO: 5337 - DNA, 20 bp, Artificial Sequence
  Description of Artificial Sequence:  Hypothetical Probe Sequence
aaagccatacggcagcgatg

SEQ ID NO: 5338 - DNA, 20 bp, Artificial Sequence
  Description of Artificial Sequence:  Hypothetical Probe Sequence
aaagcagccacgtgattgcg

SEQ ID NO: 5339 - DNA, 20 bp, Artificial Sequence
  Description of Artificial Sequence:  Hypothetical Probe Sequence
tgtccgaaggaccagctccc

SEQ ID NO: 5340 - DNA, 20 bp, Artificial Sequence
  Description of Artificial Sequence:  Hypothetical Probe Sequence
tgtcgcaaagccaaagtccc

SEQ ID NO: 5341 - DNA, 20 bp, Artificial Sequence
  Description of Artificial Sequence:  Hypothetical Probe Sequence
tcgtcacgtgcggacctgcg

SEQ ID NO: 5342 - DNA, 20 bp, Artificial Sequence
  Description of Artificial Sequence:  Hypothetical Probe Sequence
tcgtacggcgttttgatgcg

SEQ ID NO: 5343 - DNA, 20 bp, Artificial Sequence
  Description of Artificial Sequence:  Hypothetical Probe Sequence
cttgctcaatcggtgcgtgc

SEQ ID NO: 5344 - DNA, 20 bp, Artificial Sequence
  Description of Artificial Sequence:  Hypothetical Probe Sequence
cttgcacgttaggacccgaa

SEQ ID NO: 5345 - DNA, 20 bp, Artificial Sequence
  Description of Artificial Sequence:  Hypothetical Probe Sequence
tgtccttggacccgaagtgc

SEQ ID NO: 5346 - DNA, 20 bp, Artificial Sequence
  Description of Artificial Sequence:  Hypothetical Probe Sequence
cgttaccttcccgaccgacc

SEQ ID NO: 5347 - DNA, 20 bp, Artificial Sequence
  Description of Artificial Sequence:  Hypothetical Probe Sequence
ctcagcaatgtcggacagcc

SEQ ID NO: 5348 - DNA, 20 bp, Artificial Sequence
  Description of Artificial Sequence:  Hypothetical Probe Sequence
ctcatcccacctcacgagcc

SEQ ID NO: 5349 - DNA, 20 bp, Artificial Sequence
  Description of Artificial Sequence:  Hypothetical Probe Sequence
ctgtacggaatcagccgacc

SEQ ID NO: 5350 - DNA, 20 bp, Artificial Sequence
  Description of Artificial Sequence:  Hypothetical Probe Sequence
ccatcttggacccagcacgg

SEQ ID NO: 5351 - DNA, 20 bp, Artificial Sequence
  Description of Artificial Sequence:  Hypothetical Probe Sequence
tgtcccatcgaaaatccgaa

SEQ ID NO: 5352 - DNA, 20 bp, Artificial Sequence
  Description of Artificial Sequence:  Hypothetical Probe Sequence
ccatgcaaaggaaggagcaa

SEQ ID NO: 5353 - DNA, 20 bp, Artificial Sequence
  Description of Artificial Sequence:  Hypothetical Probe Sequence
ccatcctacgttgtgcgcaa

SEQ ID NO: 5354 - DNA, 20 bp, Artificial Sequence
  Description of Artificial Sequence:  Hypothetical Probe Sequence
ccatgatggcaagtgccagc

SEQ ID NO: 5355 - DNA, 20 bp, Artificial Sequence
  Description of Artificial Sequence:  Hypothetical Probe Sequence
tgtcccatcagcacgggatg

SEQ ID NO: 5356 - DNA, 20 bp, Artificial Sequence
  Description of Artificial Sequence:  Hypothetical Probe Sequence
ccatagccatactgcggtgc

SEQ ID NO: 5357 - DNA, 20 bp, Artificial Sequence
  Description of Artificial Sequence:  Hypothetical Probe Sequence
cgaacgttgcttggacgatg

SEQ ID NO: 5358 - DNA, 20 bp, Artificial Sequence
  Description of Artificial Sequence:  Hypothetical Probe Sequence
cgaagcttcttgggacggta

SEQ ID NO: 5359 - DNA, 20 bp, Artificial Sequence
  Description of Artificial Sequence:  Hypothetical Probe Sequence
tgtccgaaacctcgaatgcg

SEQ ID NO: 5360 - DNA, 20 bp, Artificial Sequence
  Description of Artificial Sequence:  Hypothetical Probe Sequence
cgaaaggaaggaggacgcaa

SEQ ID NO: 5361 - DNA, 20 bp, Artificial Sequence
  Description of Artificial Sequence:  Hypothetical Probe Sequence
cgaacctactcatccccacg

SEQ ID NO: 5362 - DNA, 20 bp, Artificial Sequence
  Description of Artificial Sequence:  Hypothetical Probe Sequence
cgaacagcggacaaagagcc

SEQ ID NO: 5363 - DNA, 20 bp, Artificial Sequence
  Description of Artificial Sequence:  Hypothetical Probe Sequence
gcttcgttcgttatcggcaa

SEQ ID NO: 5364 - DNA, 20 bp, Artificial Sequence
  Description of Artificial Sequence:  Hypothetical Probe Sequence
gcttccatcgttgatgacgg

SEQ ID NO: 5365 - DNA, 20 bp, Artificial Sequence
  Description of Artificial Sequence:  Hypothetical Probe Sequence
gcttgcttccattgtcgctt

SEQ ID NO: 5366 - DNA, 20 bp, Artificial Sequence
  Description of Artificial Sequence:  Hypothetical Probe Sequence
gcttatcgacctagccgtgc

SEQ ID NO: 5367 - DNA, 20 bp, Artificial Sequence
  Description of Artificial Sequence:  Hypothetical Probe Sequence
tgtcgcttaggaagccacgg

SEQ ID NO: 5368 - DNA, 20 bp, Artificial Sequence
  Description of Artificial Sequence:  Hypothetical Probe Sequence
ggtatcgttccctcccgtgc

SEQ ID NO: 5369 - DNA, 20 bp, Artificial Sequence
  Description of Artificial Sequence:  Hypothetical Probe Sequence
ggtagcaaacctacggcagc

SEQ ID NO: 5370 - DNA, 20 bp, Artificial Sequence
  Description of Artificial Sequence:  Hypothetical Probe Sequence
tgtcggtacagccagcgcaa

SEQ ID NO: 5371 - DNA, 20 bp, Artificial Sequence
  Description of Artificial Sequence:  Hypothetical Probe Sequence
gtcttcgtggaccgtttccc

SEQ ID NO: 5372 - DNA, 20 bp, Artificial Sequence
  Description of Artificial Sequence:  Hypothetical Probe Sequence
gtctcgaatcccgaccacgg

SEQ ID NO: 5373 - DNA, 20 bp, Artificial Sequence
  Description of Artificial Sequence:  Hypothetical Probe Sequence
tgtcgagtcagcagcccgaa

SEQ ID NO: 5374 - DNA, 20 bp, Artificial Sequence
  Description of Artificial Sequence:  Hypothetical Probe Sequence
gcaattgaccatagccgacc

SEQ ID NO: 5375 - DNA, 20 bp, Artificial Sequence
  Description of Artificial Sequence:  Hypothetical Probe Sequence
gcaaaatctcgtgatgtgcg

SEQ ID NO: 5376 - DNA, 20 bp, Artificial Sequence
  Description of Artificial Sequence:  Hypothetical Probe Sequence
gcaatcgtgcttgatgccat

SEQ ID NO: 5377 - DNA, 20 bp, Artificial Sequence
  Description of Artificial Sequence:  Hypothetical Probe Sequence
tgtcgcaagagttgcgcacg

SEQ ID NO: 5378 - DNA, 20 bp, Artificial Sequence
  Description of Artificial Sequence:  Hypothetical Probe Sequence
gcaaagtggtctgtgccgaa

SEQ ID NO: 5379 - DNA, 20 bp, Artificial Sequence
  Description of Artificial Sequence:  Hypothetical Probe Sequence
tgtcgcaatgcggaccccta

SEQ ID NO: 5380 - DNA, 20 bp, Artificial Sequence
  Description of Artificial Sequence:  Hypothetical Probe Sequence
agtgcagcagccggactgcg

SEQ ID NO: 5381 - DNA, 20 bp, Artificial Sequence
  Description of Artificial Sequence:  Hypothetical Probe Sequence
acctcacgcgaaacggcgtt

SEQ ID NO: 5382 - DNA, 20 bp, Artificial Sequence
  Description of Artificial Sequence:  Hypothetical Probe Sequence
atcgtcgtcagcgcaaagcc

SEQ ID NO: 5383 - DNA, 20 bp, Artificial Sequence
  Description of Artificial Sequence:  Hypothetical Probe Sequence
atcggatggcaaacgggtgc

SEQ ID NO: 5384 - DNA, 20 bp, Artificial Sequence
  Description of Artificial Sequence:  Hypothetical Probe Sequence
tgtcatcgtgcgcagcgtgc

SEQ ID NO: 5385 - DNA, 20 bp, Artificial Sequence
  Description of Artificial Sequence:  Hypothetical Probe Sequence
cctacagcagcccagcgtgc

SEQ ID NO: 5386 - DNA, 20 bp, Artificial Sequence
  Description of Artificial Sequence:  Hypothetical Probe Sequence
tgtccctaacgggacctgcg

SEQ ID NO: 5387 - DNA, 20 bp, Artificial Sequence
  Description of Artificial Sequence:  Hypothetical Probe Sequence
gatggtgcccatcttgccat

SEQ ID NO: 5388 - DNA, 20 bp, Artificial Sequence
  Description of Artificial Sequence:  Hypothetical Probe Sequence
gatgggacgatgcgtttccc

SEQ ID NO: 5389 - DNA, 20 bp, Artificial Sequence
  Description of Artificial Sequence:  Hypothetical Probe Sequence
tccccgttaggattgatgcg

SEQ ID NO: 5390 - DNA, 20 bp, Artificial Sequence
  Description of Artificial Sequence:  Hypothetical Probe Sequence
tcccaggaggacgaccgctt

SEQ ID NO: 5391 - DNA, 20 bp, Artificial Sequence
  Description of Artificial Sequence:  Hypothetical Probe Sequence
tgcgttgaacgggaccacct

SEQ ID NO: 5392 - DNA, 20 bp, Artificial Sequence
  Description of Artificial Sequence:  Hypothetical Probe Sequence
tgcgaatcgacccagcccat

SEQ ID NO: 5393 - DNA, 20 bp, Artificial Sequence
  Description of Artificial Sequence:  Hypothetical Probe Sequence
tgcgaaagcagccttggctt

SEQ ID NO: 5394 - DNA, 20 bp, Artificial Sequence
  Description of Artificial Sequence:  Hypothetical Probe Sequence
tgcgggtacgaacctaacgg

SEQ ID NO: 5395 - DNA, 20 bp, Artificial Sequence
  Description of Artificial Sequence:  Hypothetical Probe Sequence
tgcgagtggcaatgcggcaa

SEQ ID NO: 5396 - DNA, 20 bp, Artificial Sequence
  Description of Artificial Sequence:  Hypothetical Probe Sequence
tgcgaggacgaacacgacct

SEQ ID NO: 5397 - DNA, 20 bp, Artificial Sequence
  Description of Artificial Sequence:  Hypothetical Probe Sequence
tgtctgcgtgcggtgcccta

SEQ ID NO: 5398 - DNA, 20 bp, Artificial Sequence
  Description of Artificial Sequence:  Hypothetical Probe Sequence
tgcggtgccagctctggtgc

SEQ ID NO: 5399 - DNA, 20 bp, Artificial Sequence
  Description of Artificial Sequence:  Hypothetical Probe Sequence
cacgtcgtgacccttgccat

SEQ ID NO: 5400 - DNA, 20 bp, Artificial Sequence
  Description of Artificial Sequence:  Hypothetical Probe Sequence
tgtccacgcttggacccacg

SEQ ID NO: 5401 - DNA, 20 bp, Artificial Sequence
  Description of Artificial Sequence:  Hypothetical Probe Sequence
tgtccacggcttcctagcaa

SEQ ID NO: 5402 - DNA, 20 bp, Artificial Sequence
  Description of Artificial Sequence:  Hypothetical Probe Sequence
cacgggtactgtcacgacgg

SEQ ID NO: 5403 - DNA, 20 bp, Artificial Sequence
  Description of Artificial Sequence:  Hypothetical Probe Sequence
tgtccacggacctcgtgctt

SEQ ID NO: 5404 - DNA, 20 bp, Artificial Sequence
  Description of Artificial Sequence:  Hypothetical Probe Sequence
cagcaccttcgtacggtccc

SEQ ID NO: 5405 - DNA, 20 bp, Artificial Sequence
  Description of Artificial Sequence:  Hypothetical Probe Sequence
cagcgaccttgaggaccagc

SEQ ID NO: 5406 - DNA, 20 bp, Artificial Sequence
  Description of Artificial Sequence:  Hypothetical Probe Sequence
tgtcgaccaatctcccgtgc

SEQ ID NO: 5407 - DNA, 20 bp, Artificial Sequence
  Description of Artificial Sequence:  Hypothetical Probe Sequence
gaccaggactcatgcggcaa

SEQ ID NO: 5408 - DNA, 20 bp, Artificial Sequence
  Description of Artificial Sequence:  Hypothetical Probe Sequence
gtgcaatcaatccacgccat

SEQ ID NO: 5409 - DNA, 20 bp, Artificial Sequence
  Description of Artificial Sequence:  Hypothetical Probe Sequence
tgtcgtgctcgtgcaagacc

SEQ ID NO: 5410 - DNA, 20 bp, Artificial Sequence
  Description of Artificial Sequence:  Hypothetical Probe Sequence
gtgccttgctgtcacgcacg

SEQ ID NO: 5411 - DNA, 20 bp, Artificial Sequence
  Description of Artificial Sequence:  Hypothetical Probe Sequence
tgtcgtgcggtatctggcaa

SEQ ID NO: 5412 - DNA, 20 bp, Artificial Sequence
  Description of Artificial Sequence:  Hypothetical Probe Sequence
gtgcgtcttctgggacggac

SEQ ID NO: 5413 - DNA, 20 bp, Artificial Sequence
  Description of Artificial Sequence:  Hypothetical Probe Sequence
tgtcgtgcacctacctgtgc

SEQ ID NO: 5414 - DNA, 20 bp, Artificial Sequence
  Description of Artificial Sequence:  Hypothetical Probe Sequence
gtgcaggactgtcgaaacgg

SEQ ID NO: 5415 - DNA, 20 bp, Artificial Sequence
  Description of Artificial Sequence:  Hypothetical Probe Sequence
tgtcgtgctccccgaaaatc

SEQ ID NO: 5416 - DNA, 20 bp, Artificial Sequence
  Description of Artificial Sequence:  Hypothetical Probe Sequence
tgtcggacctgtgcttagcc

SEQ ID NO: 5417 - DNA, 20 bp, Artificial Sequence
  Description of Artificial Sequence:  Hypothetical Probe Sequence
ggacgtctggtaagccgctt

SEQ ID NO: 5418 - DNA, 20 bp, Artificial Sequence
  Description of Artificial Sequence:  Hypothetical Probe Sequence
tgtcggacacctcgttacgg

SEQ ID NO: 5419 - DNA, 20 bp, Artificial Sequence
  Description of Artificial Sequence:  Hypothetical Probe Sequence
tgtcggaccctaaatcgctt

SEQ ID NO: 5420 - DNA, 20 bp, Artificial Sequence
  Description of Artificial Sequence:  Hypothetical Probe Sequence
ggacgatgagtgcctaagcc

SEQ ID NO: 5421 - DNA, 20 bp, Artificial Sequence
  Description of Artificial Sequence:  Hypothetical Probe Sequence
ggactcccgaccagtggtgc

SEQ ID NO: 5422 - DNA, 20 bp, Artificial Sequence
  Description of Artificial Sequence:  Hypothetical Probe Sequence
tgtcacggttgatcccacgg

SEQ ID NO: 5423 - DNA, 20 bp, Artificial Sequence
  Description of Artificial Sequence:  Hypothetical Probe Sequence
tgtcacggcttgcgttgcaa

SEQ ID NO: 5424 - DNA, 20 bp, Artificial Sequence
  Description of Artificial Sequence:  Hypothetical Probe Sequence
acgggcttacctgatgccat

SEQ ID NO: 5425 - DNA, 20 bp, Artificial Sequence
  Description of Artificial Sequence:  Hypothetical Probe Sequence
acgggagtaggacgtttgcg

SEQ ID NO: 5426 - DNA, 20 bp, Artificial Sequence
  Description of Artificial Sequence:  Hypothetical Probe Sequence
tgtcacgggcaaaaagcgaa

SEQ ID NO: 5427 - DNA, 20 bp, Artificial Sequence
  Description of Artificial Sequence:  Hypothetical Probe Sequence
acggtccccttgggacagga

SEQ ID NO: 5428 - DNA, 20 bp, Artificial Sequence
  Description of Artificial Sequence:  Hypothetical Probe Sequence
agccctgtataccgaatgcg

SEQ ID NO: 5429 - DNA, 20 bp, Artificial Sequence
  Description of Artificial Sequence:  Hypothetical Probe Sequence
agccgcttttgacgtttcgt

SEQ ID NO: 5430 - DNA, 20 bp, Artificial Sequence
  Description of Artificial Sequence:  Hypothetical Probe Sequence
agccacctgcaagatggctt

SEQ ID NO: 5431 - DNA, 20 bp, Artificial Sequence
  Description of Artificial Sequence:  Hypothetical Probe Sequence
agccatcgttagcagccagc

SEQ ID NO: 5432 - DNA, 20 bp, Artificial Sequence
  Description of Artificial Sequence:  Hypothetical Probe Sequence
tgtcagccgaccgctttcgt

SEQ ID NO: 5433 - DNA, 20 bp, Artificial Sequence
  Description of Artificial Sequence:  Hypothetical Probe Sequence
tgatgcttcttggtgcgctt

SEQ ID NO: 5434 - DNA, 20 bp, Artificial Sequence
  Description of Artificial Sequence:  Hypothetical Probe Sequence
ttagggacagccagccacgg

SEQ ID NO: 5435 - DNA, 20 bp, Artificial Sequence
  Description of Artificial Sequence:  Hypothetical Probe Sequence
aatccacgcgttggtaacgg

SEQ ID NO: 5436 - DNA, 20 bp, Artificial Sequence
  Description of Artificial Sequence:  Hypothetical Probe Sequence
aaagggacaggatccctgcg

SEQ ID NO: 5437 - DNA, 20 bp, Artificial Sequence
  Description of Artificial Sequence:  Hypothetical Probe Sequence
aaagagccaaagcacgccat

SEQ ID NO: 5438 - DNA, 20 bp, Artificial Sequence
  Description of Artificial Sequence:  Hypothetical Probe Sequence
tcgttctgtgcgcgaagtgc

SEQ ID NO: 5439 - DNA, 20 bp, Artificial Sequence
  Description of Artificial Sequence:  Hypothetical Probe Sequence
tctgcacgatacgaccgctt

SEQ ID NO: 5440 - DNA, 20 bp, Artificial Sequence
  Description of Artificial Sequence:  Hypothetical Probe Sequence
tcgttgtccgttgagttgcg

SEQ ID NO: 5441 - DNA, 20 bp, Artificial Sequence
  Description of Artificial Sequence:  Hypothetical Probe Sequence
tgtcctcaacggtgcggctt

SEQ ID NO: 5442 - DNA, 20 bp, Artificial Sequence
  Description of Artificial Sequence:  Hypothetical Probe Sequence
tgtcgagttgcgcttggacc

SEQ ID NO: 5443 - DNA, 20 bp, Artificial Sequence
  Description of Artificial Sequence:  Hypothetical Probe Sequence
tcgttgtccacgagcccgtt

SEQ ID NO: 5444 - DNA, 20 bp, Artificial Sequence
  Description of Artificial Sequence:  Hypothetical Probe Sequence
tcgttgtcacggtcgtgcaa

SEQ ID NO: 5445 - DNA, 20 bp, Artificial Sequence
  Description of Artificial Sequence:  Hypothetical Probe Sequence
tcgttcgtggtatgcgccta

SEQ ID NO: 5446 - DNA, 20 bp, Artificial Sequence
  Description of Artificial Sequence:  Hypothetical Probe Sequence
tcgttgcgatcgtacatgcg

SEQ ID NO: 5447 - DNA, 20 bp, Artificial Sequence
  Description of Artificial Sequence:  Hypothetical Probe Sequence
cttgcgttcttgcttgcagc

SEQ ID NO: 5448 - DNA, 20 bp, Artificial Sequence
  Description of Artificial Sequence:  Hypothetical Probe Sequence
tcgtcttgtcccggactccc

SEQ ID NO: 5449 - DNA, 20 bp, Artificial Sequence
  Description of Artificial Sequence:  Hypothetical Probe Sequence
tcgtcttggaccagccacct

SEQ ID NO: 5450 - DNA, 20 bp, Artificial Sequence
  Description of Artificial Sequence:  Hypothetical Probe Sequence
cttgagccagccatacacgg

SEQ ID NO: 5451 - DNA, 20 bp, Artificial Sequence
  Description of Artificial Sequence:  Hypothetical Probe Sequence
cgtttgatgcaacagcgtgc

SEQ ID NO: 5452 - DNA, 20 bp, Artificial Sequence
  Description of Artificial Sequence:  Hypothetical Probe Sequence
cgtttgtcaatcgtgcgtgc

SEQ ID NO: 5453 - DNA, 20 bp, Artificial Sequence
  Description of Artificial Sequence:  Hypothetical Probe Sequence
cgttcgaaggtagcaatgcg

SEQ ID NO: 5454 - DNA, 20 bp, Artificial Sequence
  Description of Artificial Sequence:  Hypothetical Probe Sequence
cgttacctcgttcgaatgcg

SEQ ID NO: 5455 - DNA, 20 bp, Artificial Sequence
  Description of Artificial Sequence:  Hypothetical Probe Sequence
tcgtcgttgacccacgcacg

SEQ ID NO: 5456 - DNA, 20 bp, Artificial Sequence
  Description of Artificial Sequence:  Hypothetical Probe Sequence
tcgtcgttagccagccttga

SEQ ID NO: 5457 - DNA, 20 bp, Artificial Sequence
  Description of Artificial Sequence:  Hypothetical Probe Sequence
tcgtctcacagcgtgccgtt

SEQ ID NO: 5458 - DNA, 20 bp, Artificial Sequence
  Description of Artificial Sequence:  Hypothetical Probe Sequence
ctcaagccttaggtgccacg

SEQ ID NO: 5459 - DNA, 20 bp, Artificial Sequence
  Description of Artificial Sequence:  Hypothetical Probe Sequence
ctgtagcccagctgcggctt

SEQ ID NO: 5460 - DNA, 20 bp, Artificial Sequence
  Description of Artificial Sequence:  Hypothetical Probe Sequence
ccatctcaagccccatgcaa

SEQ ID NO: 5461 - DNA, 20 bp, Artificial Sequence
  Description of Artificial Sequence:  Hypothetical Probe Sequence
ccatcagcggtaacgggacc

SEQ ID NO: 5462 - DNA, 20 bp, Artificial Sequence
  Description of Artificial Sequence:  Hypothetical Probe Sequence
tcgtccatgacccacgcttg

SEQ ID NO: 5463 - DNA, 20 bp, Artificial Sequence
  Description of Artificial Sequence:  Hypothetical Probe Sequence
cgaaaatcacggtgtcgctt

SEQ ID NO: 5464 - DNA, 20 bp, Artificial Sequence
  Description of Artificial Sequence:  Hypothetical Probe Sequence
tcgtcgaaaaaggaccacgg

SEQ ID NO: 5465 - DNA, 20 bp, Artificial Sequence
  Description of Artificial Sequence:  Hypothetical Probe Sequence
cgaatctgtgcgggaccacg

SEQ ID NO: 5466 - DNA, 20 bp, Artificial Sequence
  Description of Artificial Sequence:  Hypothetical Probe Sequence
tcgtcgaaaccttcccggac

SEQ ID NO: 5467 - DNA, 20 bp, Artificial Sequence
  Description of Artificial Sequence:  Hypothetical Probe Sequence
tcgtcgaaaggaatcggatg

SEQ ID NO: 5468 - DNA, 20 bp, Artificial Sequence
  Description of Artificial Sequence:  Hypothetical Probe Sequence
tcgtcgaagtgcgcaatccc

SEQ ID NO: 5469 - DNA, 20 bp, Artificial Sequence
  Description of Artificial Sequence:  Hypothetical Probe Sequence
tcgtgcttctcagacctgcg

SEQ ID NO: 5470 - DNA, 20 bp, Artificial Sequence
  Description of Artificial Sequence:  Hypothetical Probe Sequence
tcgtggtaagcccacggagt

SEQ ID NO: 5471 - DNA, 20 bp, Artificial Sequence
  Description of Artificial Sequence:  Hypothetical Probe Sequence
gtctcgtttcccacggagcc

SEQ ID NO: 5472 - DNA, 20 bp, Artificial Sequence
  Description of Artificial Sequence:  Hypothetical Probe Sequence
gtctgcaaagccagccgtgc

SEQ ID NO: 5473 - DNA, 20 bp, Artificial Sequence
  Description of Artificial Sequence:  Hypothetical Probe Sequence
tcgtgtctgtgcatcgtgcg

SEQ ID NO: 5474 - DNA, 20 bp, Artificial Sequence
  Description of Artificial Sequence:  Hypothetical Probe Sequence
gagttcgtcagcggacgacc

SEQ ID NO: 5475 - DNA, 20 bp, Artificial Sequence
  Description of Artificial Sequence:  Hypothetical Probe Sequence
gagtccattgcggtcttccc

SEQ ID NO: 5476 - DNA, 20 bp, Artificial Sequence
  Description of Artificial Sequence:  Hypothetical Probe Sequence
tcgtgcaattgatgtcgtgc

SEQ ID NO: 5477 - DNA, 20 bp, Artificial Sequence
  Description of Artificial Sequence:  Hypothetical Probe Sequence
tcgtgcaagcttcttggatg

SEQ ID NO: 5478 - DNA, 20 bp, Artificial Sequence
  Description of Artificial Sequence:  Hypothetical Probe Sequence
tcgtgcaatgcggtgctcgt

SEQ ID NO: 5479 - DNA, 20 bp, Artificial Sequence
  Description of Artificial Sequence:  Hypothetical Probe Sequence
tcgtgcaaggacagcctcgt

SEQ ID NO: 5480 - DNA, 20 bp, Artificial Sequence
  Description of Artificial Sequence:  Hypothetical Probe Sequence
agtgtgcgggtaacgggtgc

SEQ ID NO: 5481 - DNA, 20 bp, Artificial Sequence
  Description of Artificial Sequence:  Hypothetical Probe Sequence
agtggtgcgatggtgcgtgc

SEQ ID NO: 5482 - DNA, 20 bp, Artificial Sequence
  Description of Artificial Sequence:  Hypothetical Probe Sequence
acctcagcacggacggggac

SEQ ID NO: 5483 - DNA, 20 bp, Artificial Sequence
  Description of Artificial Sequence:  Hypothetical Probe Sequence
tcgtatcggcttatcgcacg

SEQ ID NO: 5484 - DNA, 20 bp, Artificial Sequence
  Description of Artificial Sequence:  Hypothetical Probe Sequence
atcgggacgacctcccagga

SEQ ID NO: 5485 - DNA, 20 bp, Artificial Sequence
  Description of Artificial Sequence:  Hypothetical Probe Sequence
aggagacctctgagccagcc

SEQ ID NO: 5486 - DNA, 20 bp, Artificial Sequence
  Description of Artificial Sequence:  Hypothetical Probe Sequence
aggaagccccatccatgtgc

SEQ ID NO: 5487 - DNA, 20 bp, Artificial Sequence
  Description of Artificial Sequence:  Hypothetical Probe Sequence
cctaaaagtgcgtgcgagcc

SEQ ID NO: 5488 - DNA, 20 bp, Artificial Sequence
  Description of Artificial Sequence:  Hypothetical Probe Sequence
tcgtgatgagccgcaacagc

SEQ ID NO: 5489 - DNA, 20 bp, Artificial Sequence
  Description of Artificial Sequence:  Hypothetical Probe Sequence
tcgttcccctgtttagcgaa

SEQ ID NO: 5490 - DNA, 20 bp, Artificial Sequence
  Description of Artificial Sequence:  Hypothetical Probe Sequence
tcgttcccccataaaggtgc

SEQ ID NO: 5491 - DNA, 20 bp, Artificial Sequence
  Description of Artificial Sequence:  Hypothetical Probe Sequence
tcccgtctgcaacctagcaa

SEQ ID NO: 5492 - DNA, 20 bp, Artificial Sequence
  Description of Artificial Sequence:  Hypothetical Probe Sequence
tcccgagtccatcttggcaa

SEQ ID NO: 5493 - DNA, 20 bp, Artificial Sequence
  Description of Artificial Sequence:  Hypothetical Probe Sequence
tcgttccctgcgtcgtacgg

SEQ ID NO: 5494 - DNA, 20 bp, Artificial Sequence
  Description of Artificial Sequence:  Hypothetical Probe Sequence
tcgttcccggactgtcgtgc

SEQ ID NO: 5495 - DNA, 20 bp, Artificial Sequence
  Description of Artificial Sequence:  Hypothetical Probe Sequence
tcgttgcgaatcaatcgcaa

SEQ ID NO: 5496 - DNA, 20 bp, Artificial Sequence
  Description of Artificial Sequence:  Hypothetical Probe Sequence
tgcgtcgtagtggagttgcg

SEQ ID NO: 5497 - DNA, 20 bp, Artificial Sequence
  Description of Artificial Sequence:  Hypothetical Probe Sequence
tcgttgcgctcattgatgcg

SEQ ID NO: 5498 - DNA, 20 bp, Artificial Sequence
  Description of Artificial Sequence:  Hypothetical Probe Sequence
tgcggagtggtagacccacg

SEQ ID NO: 5499 - DNA, 20 bp, Artificial Sequence
  Description of Artificial Sequence:  Hypothetical Probe Sequence
tcgttgcgagtgaaagcgaa

SEQ ID NO: 5500 - DNA, 20 bp, Artificial Sequence
  Description of Artificial Sequence:  Hypothetical Probe Sequence
tgcggatgggtaggacagcc

SEQ ID NO: 5501 - DNA, 20 bp, Artificial Sequence
  Description of Artificial Sequence:  Hypothetical Probe Sequence
tcgttgcgcagctgtccacg

SEQ ID NO: 5502 - DNA, 20 bp, Artificial Sequence
  Description of Artificial Sequence:  Hypothetical Probe Sequence
tcgttgcggaccaaaggtgc

SEQ ID NO: 5503 - DNA, 20 bp, Artificial Sequence
  Description of Artificial Sequence:  Hypothetical Probe Sequence
tcgttgcgagccaatctcgt

SEQ ID NO: 5504 - DNA, 20 bp, Artificial Sequence
  Description of Artificial Sequence:  Hypothetical Probe Sequence
cacgaaagatacacggcagc

SEQ ID NO: 5505 - DNA, 20 bp, Artificial Sequence
  Description of Artificial Sequence:  Hypothetical Probe Sequence
cacgtctgtccctgcgagcc

SEQ ID NO: 5506 - DNA, 20 bp, Artificial Sequence
  Description of Artificial Sequence:  Hypothetical Probe Sequence
cacgcttgctcacagctccc

SEQ ID NO: 5507 - DNA, 20 bp, Artificial Sequence
  Description of Artificial Sequence:  Hypothetical Probe Sequence
tcgtcacgcgtttctgggta

SEQ ID NO: 5508 - DNA, 20 bp, Artificial Sequence
  Description of Artificial Sequence:  Hypothetical Probe Sequence
tcgtcacgctgtagccccta

SEQ ID NO: 5509 - DNA, 20 bp, Artificial Sequence
  Description of Artificial Sequence:  Hypothetical Probe Sequence
tcgtcacgccatgatggatg

SEQ ID NO: 5510 - DNA, 20 bp, Artificial Sequence
  Description of Artificial Sequence:  Hypothetical Probe Sequence
cacggcaatacagaccggac

SEQ ID NO: 5511 - DNA, 20 bp, Artificial Sequence
  Description of Artificial Sequence:  Hypothetical Probe Sequence
cacgagtgaaaggcttgtgc

SEQ ID NO: 5512 - DNA, 20 bp, Artificial Sequence
  Description of Artificial Sequence:  Hypothetical Probe Sequence
tcgtcacgatcgtctgacgg

SEQ ID NO: 5513 - DNA, 20 bp, Artificial Sequence
  Description of Artificial Sequence:  Hypothetical Probe Sequence
tcgtcacgacgggatgacgg

SEQ ID NO: 5514 - DNA, 20 bp, Artificial Sequence
  Description of Artificial Sequence:  Hypothetical Probe Sequence
tcgtcagcctcatgtcagcc

SEQ ID NO: 5515 - DNA, 20 bp, Artificial Sequence
  Description of Artificial Sequence:  Hypothetical Probe Sequence
cagcccatgacctgtcagcc

SEQ ID NO: 5516 - DNA, 20 bp, Artificial Sequence
  Description of Artificial Sequence:  Hypothetical Probe Sequence
cagcggtattgaggaccgtt

SEQ ID NO: 5517 - DNA, 20 bp, Artificial Sequence
  Description of Artificial Sequence:  Hypothetical Probe Sequence
cagcgagtagtgcagcgtgc

SEQ ID NO: 5518 - DNA, 20 bp, Artificial Sequence
  Description of Artificial Sequence:  Hypothetical Probe Sequence
cagcgaccgagttcgttccc

SEQ ID NO: 5519 - DNA, 20 bp, Artificial Sequence
  Description of Artificial Sequence:  Hypothetical Probe Sequence
gaccaatccgttggactgcg

SEQ ID NO: 5520 - DNA, 20 bp, Artificial Sequence
  Description of Artificial Sequence:  Hypothetical Probe Sequence
gaccaaagcttgagccgtgc

SEQ ID NO: 5521 - DNA, 20 bp, Artificial Sequence
  Description of Artificial Sequence:  Hypothetical Probe Sequence
gacccgttaccttctgacgg

SEQ ID NO: 5522 - DNA, 20 bp, Artificial Sequence
  Description of Artificial Sequence:  Hypothetical Probe Sequence
gaccctgtttgaagccgctt

SEQ ID NO: 5523 - DNA, 20 bp, Artificial Sequence
  Description of Artificial Sequence:  Hypothetical Probe Sequence
gaccgcttccatgagttccc

SEQ ID NO: 5524 - DNA, 20 bp, Artificial Sequence
  Description of Artificial Sequence:  Hypothetical Probe Sequence
gaccgtctggacgtgcgacc

SEQ ID NO: 5525 - DNA, 20 bp, Artificial Sequence
  Description of Artificial Sequence:  Hypothetical Probe Sequence
gaccatcgtcgtaggatgcg

SEQ ID NO: 5526 - DNA, 20 bp, Artificial Sequence
  Description of Artificial Sequence:  Hypothetical Probe Sequence
tcgtgtgcaatctctgccat

SEQ ID NO: 5527 - DNA, 20 bp, Artificial Sequence
  Description of Artificial Sequence:  Hypothetical Probe Sequence
gtgctctgccatagccgcaa

SEQ ID NO: 5528 - DNA, 20 bp, Artificial Sequence
  Description of Artificial Sequence:  Hypothetical Probe Sequence
tcgtgtgctgtcgcaatccc

SEQ ID NO: 5529 - DNA, 20 bp, Artificial Sequence
  Description of Artificial Sequence:  Hypothetical Probe Sequence
gtgccttgataccacgcagc

SEQ ID NO: 5530 - DNA, 20 bp, Artificial Sequence
  Description of Artificial Sequence:  Hypothetical Probe Sequence
tcgtgtgcctgtgcttccat

SEQ ID NO: 5531 - DNA, 20 bp, Artificial Sequence
  Description of Artificial Sequence:  Hypothetical Probe Sequence
gtgcggtaacctacggacgg

SEQ ID NO: 5532 - DNA, 20 bp, Artificial Sequence
  Description of Artificial Sequence:  Hypothetical Probe Sequence
gtgcgtctggacagtgcgtt

SEQ ID NO: 5533 - DNA, 20 bp, Artificial Sequence
  Description of Artificial Sequence:  Hypothetical Probe Sequence
tcgtgtgcgagtcacgagga

SEQ ID NO: 5534 - DNA, 20 bp, Artificial Sequence
  Description of Artificial Sequence:  Hypothetical Probe Sequence
tcgtgtgcgcaaaaagagcc

SEQ ID NO: 5535 - DNA, 20 bp, Artificial Sequence
  Description of Artificial Sequence:  Hypothetical Probe Sequence
ggacttgatccctgcgcgtt

SEQ ID NO: 5536 - DNA, 20 bp, Artificial Sequence
  Description of Artificial Sequence:  Hypothetical Probe Sequence
ggacaatccagcgacccgtt

SEQ ID NO: 5537 - DNA, 20 bp, Artificial Sequence
  Description of Artificial Sequence:  Hypothetical Probe Sequence
ggacaaaggcaagtgccgaa

SEQ ID NO: 5538 - DNA, 20 bp, Artificial Sequence
  Description of Artificial Sequence:  Hypothetical Probe Sequence
tcgtggaccttggaccgtct

SEQ ID NO: 5539 - DNA, 20 bp, Artificial Sequence
  Description of Artificial Sequence:  Hypothetical Probe Sequence
tcgtggacctgttgcgccta

SEQ ID NO: 5540 - DNA, 20 bp, Artificial Sequence
  Description of Artificial Sequence:  Hypothetical Probe Sequence
ggacgagttctggtgcgacc

SEQ ID NO: 5541 - DNA, 20 bp, Artificial Sequence
  Description of Artificial Sequence:  Hypothetical Probe Sequence
ggacgatgcctacagcccat

SEQ ID NO: 5542 - DNA, 20 bp, Artificial Sequence
  Description of Artificial Sequence:  Hypothetical Probe Sequence
ggactccctcccatacagcc

SEQ ID NO: 5543 - DNA, 20 bp, Artificial Sequence
  Description of Artificial Sequence:  Hypothetical Probe Sequence
tcgtggactgcggtgcctca

SEQ ID NO: 5544 - DNA, 20 bp, Artificial Sequence
  Description of Artificial Sequence:  Hypothetical Probe Sequence
ggaccacgttagatcggcaa

SEQ ID NO: 5545 - DNA, 20 bp, Artificial Sequence
  Description of Artificial Sequence:  Hypothetical Probe Sequence
ggacagccccatagtgcgaa

SEQ ID NO: 5546 - DNA, 20 bp, Artificial Sequence
  Description of Artificial Sequence:  Hypothetical Probe Sequence
acggtcgttctgatcgcgtt

SEQ ID NO: 5547 - DNA, 20 bp, Artificial Sequence
  Description of Artificial Sequence:  Hypothetical Probe Sequence
acggccatggtatcgtgcaa

SEQ ID NO: 5548 - DNA, 20 bp, Artificial Sequence
  Description of Artificial Sequence:  Hypothetical Probe Sequence
acggcctaatcgctcaatcg

SEQ ID NO: 5549 - DNA, 20 bp, Artificial Sequence
  Description of Artificial Sequence:  Hypothetical Probe Sequence
tcgtagccttgacagcgcaa

SEQ ID NO: 5550 - DNA, 20 bp, Artificial Sequence
  Description of Artificial Sequence:  Hypothetical Probe Sequence
agcctgtcggtaagcctgcg

SEQ ID NO: 5551 - DNA, 20 bp, Artificial Sequence
  Description of Artificial Sequence:  Hypothetical Probe Sequence
agcctcgtaggactgttgcg

SEQ ID NO: 5552 - DNA, 20 bp, Artificial Sequence
  Description of Artificial Sequence:  Hypothetical Probe Sequence
agcccgtttctgttgatgcg

SEQ ID NO: 5553 - DNA, 20 bp, Artificial Sequence
  Description of Artificial Sequence:  Hypothetical Probe Sequence
agccccatgagtgaccccat

SEQ ID NO: 5554 - DNA, 20 bp, Artificial Sequence
  Description of Artificial Sequence:  Hypothetical Probe Sequence
agcctgcgatactccccacg

SEQ ID NO: 5555 - DNA, 20 bp, Artificial Sequence
  Description of Artificial Sequence:  Hypothetical Probe Sequence
ttgaagccgaccggtaacgg

SEQ ID NO: 5556 - DNA, 20 bp, Artificial Sequence
  Description of Artificial Sequence:  Hypothetical Probe Sequence
aatcgaccacgggtgcacgg

SEQ ID NO: 5557 - DNA, 20 bp, Artificial Sequence
  Description of Artificial Sequence:  Hypothetical Probe Sequence
aaagtcccggaccgaatgcg

SEQ ID NO: 5558 - DNA, 20 bp, Artificial Sequence
  Description of Artificial Sequence:  Hypothetical Probe Sequence
tctgcacggacccctatgcg

SEQ ID NO: 5559 - DNA, 20 bp, Artificial Sequence
  Description of Artificial Sequence:  Hypothetical Probe Sequence
cttgcttgacctgcaaacgg

SEQ ID NO: 5560 - DNA, 20 bp, Artificial Sequence
  Description of Artificial Sequence:  Hypothetical Probe Sequence
cttgatcgttagtgcgacgg

SEQ ID NO: 5561 - DNA, 20 bp, Artificial Sequence
  Description of Artificial Sequence:  Hypothetical Probe Sequence
cttgcctacttgcacggcaa

SEQ ID NO: 5562 - DNA, 20 bp, Artificial Sequence
  Description of Artificial Sequence:  Hypothetical Probe Sequence
cttggatgggacatcgcgaa

SEQ ID NO: 5563 - DNA, 20 bp, Artificial Sequence
  Description of Artificial Sequence:  Hypothetical Probe Sequence
cgttttgaagccggtaacgg

SEQ ID NO: 5564 - DNA, 20 bp, Artificial Sequence
  Description of Artificial Sequence:  Hypothetical Probe Sequence
cttgcgttaccttgcggacc

SEQ ID NO: 5565 - DNA, 20 bp, Artificial Sequence
  Description of Artificial Sequence:  Hypothetical Probe Sequence
ctcacacgggacaggaagcc

SEQ ID NO: 5566 - DNA, 20 bp, Artificial Sequence
  Description of Artificial Sequence:  Hypothetical Probe Sequence
ctcagtgccagcgaccacgg

SEQ ID NO: 5567 - DNA, 20 bp, Artificial Sequence
  Description of Artificial Sequence:  Hypothetical Probe Sequence
ctgtgcaagtgccgttacgg

SEQ ID NO: 5568 - DNA, 20 bp, Artificial Sequence
  Description of Artificial Sequence:  Hypothetical Probe Sequence
cttgccatccatcacggcaa

SEQ ID NO: 5569 - DNA, 20 bp, Artificial Sequence
  Description of Artificial Sequence:  Hypothetical Probe Sequence
ccatgcttagtggtgcagcc

SEQ ID NO: 5570 - DNA, 20 bp, Artificial Sequence
  Description of Artificial Sequence:  Hypothetical Probe Sequence
cttgcgaattgaatcggtgc

SEQ ID NO: 5571 - DNA, 20 bp, Artificial Sequence
  Description of Artificial Sequence:  Hypothetical Probe Sequence
cgaagcttcctaggacgctt

SEQ ID NO: 5572 - DNA, 20 bp, Artificial Sequence
  Description of Artificial Sequence:  Hypothetical Probe Sequence
cttggcttccatcacgtccc

SEQ ID NO: 5573 - DNA, 20 bp, Artificial Sequence
  Description of Artificial Sequence:  Hypothetical Probe Sequence
gcttgtcttcccgaccggac

SEQ ID NO: 5574 - DNA, 20 bp, Artificial Sequence
  Description of Artificial Sequence:  Hypothetical Probe Sequence
gcttcagcggacctgttccc

SEQ ID NO: 5575 - DNA, 20 bp, Artificial Sequence
  Description of Artificial Sequence:  Hypothetical Probe Sequence
gcttgtgccttgcttggctt

SEQ ID NO: 5576 - DNA, 20 bp, Artificial Sequence
  Description of Artificial Sequence:  Hypothetical Probe Sequence
gcttacggcgttagccagga

SEQ ID NO: 5577 - DNA, 20 bp, Artificial Sequence
  Description of Artificial Sequence:  Hypothetical Probe Sequence
gtcttcgtcctatcccacgg

SEQ ID NO: 5578 - DNA, 20 bp, Artificial Sequence
  Description of Artificial Sequence:  Hypothetical Probe Sequence
gtctcacggcaagacccagc

SEQ ID NO: 5579 - DNA, 20 bp, Artificial Sequence
  Description of Artificial Sequence:  Hypothetical Probe Sequence
gcaagctttgattcccccat

SEQ ID NO: 5580 - DNA, 20 bp, Artificial Sequence
  Description of Artificial Sequence:  Hypothetical Probe Sequence
gcaagagtggacaggatgcg

SEQ ID NO: 5581 - DNA, 20 bp, Artificial Sequence
  Description of Artificial Sequence:  Hypothetical Probe Sequence
gcaaacctttagcacgcgtt

SEQ ID NO: 5582 - DNA, 20 bp, Artificial Sequence
  Description of Artificial Sequence:  Hypothetical Probe Sequence
gcaaatcgaaaggatggctt

SEQ ID NO: 5583 - DNA, 20 bp, Artificial Sequence
  Description of Artificial Sequence:  Hypothetical Probe Sequence
cttggcaaaggaagccctgt

SEQ ID NO: 5584 - DNA, 20 bp, Artificial Sequence
  Description of Artificial Sequence:  Hypothetical Probe Sequence
gcaagaccagccgtgcgacc

SEQ ID NO: 5585 - DNA, 20 bp, Artificial Sequence
  Description of Artificial Sequence:  Hypothetical Probe Sequence
agtgcgaagaccatcgacgg

SEQ ID NO: 5586 - DNA, 20 bp, Artificial Sequence
  Description of Artificial Sequence:  Hypothetical Probe Sequence
acctgtgcggacagcccgaa

SEQ ID NO: 5587 - DNA, 20 bp, Artificial Sequence
  Description of Artificial Sequence:  Hypothetical Probe Sequence
aggatgcgacctcagcggac

SEQ ID NO: 5588 - DNA, 20 bp, Artificial Sequence
  Description of Artificial Sequence:  Hypothetical Probe Sequence
aggacacgagcccagccgaa

SEQ ID NO: 5589 - DNA, 20 bp, Artificial Sequence
  Description of Artificial Sequence:  Hypothetical Probe Sequence
cttgcctaatcgaggatgcg

SEQ ID NO: 5590 - DNA, 20 bp, Artificial Sequence
  Description of Artificial Sequence:  Hypothetical Probe Sequence
cctaacggtcccaatcctca

SEQ ID NO: 5591 - DNA, 20 bp, Artificial Sequence
  Description of Artificial Sequence:  Hypothetical Probe Sequence
cttggatgtcgtgaccagcc

SEQ ID NO: 5592 - DNA, 20 bp, Artificial Sequence
  Description of Artificial Sequence:  Hypothetical Probe Sequence
cttggatgcttgcagcagcc

SEQ ID NO: 5593 - DNA, 20 bp, Artificial Sequence
  Description of Artificial Sequence:  Hypothetical Probe Sequence
cttggatgcgttgcttgacc

SEQ ID NO: 5594 - DNA, 20 bp, Artificial Sequence
  Description of Artificial Sequence:  Hypothetical Probe Sequence
gatgctgttcgtcagccgaa

SEQ ID NO: 5595 - DNA, 20 bp, Artificial Sequence
  Description of Artificial Sequence:  Hypothetical Probe Sequence
gatggcaaagccgagtgctt

SEQ ID NO: 5596 - DNA, 20 bp, Artificial Sequence
  Description of Artificial Sequence:  Hypothetical Probe Sequence
tcccctgtcttgagccccat

SEQ ID NO: 5597 - DNA, 20 bp, Artificial Sequence
  Description of Artificial Sequence:  Hypothetical Probe Sequence
tcccacgggcaattgaatcg

SEQ ID NO: 5598 - DNA, 20 bp, Artificial Sequence
  Description of Artificial Sequence:  Hypothetical Probe Sequence
tgcgtgtccagcgtgctccc

SEQ ID NO: 5599 - DNA, 20 bp, Artificial Sequence
  Description of Artificial Sequence:  Hypothetical Probe Sequence
tgcgtcgtttgacagccagc

SEQ ID NO: 5600 - DNA, 20 bp, Artificial Sequence
  Description of Artificial Sequence:  Hypothetical Probe Sequence
tgcgtgcgccattctgctgt

SEQ ID NO: 5601 - DNA, 20 bp, Artificial Sequence
  Description of Artificial Sequence:  Hypothetical Probe Sequence
cttgtgcgcagcagtgcacg

SEQ ID NO: 5602 - DNA, 20 bp, Artificial Sequence
  Description of Artificial Sequence:  Hypothetical Probe Sequence
cacgaatctctggaccgtgc

SEQ ID NO: 5603 - DNA, 20 bp, Artificial Sequence
  Description of Artificial Sequence:  Hypothetical Probe Sequence
cttgcacgcttgttgagcaa

SEQ ID NO: 5604 - DNA, 20 bp, Artificial Sequence
  Description of Artificial Sequence:  Hypothetical Probe Sequence
cttgcacgagtggcaaagcc

SEQ ID NO: 5605 - DNA, 20 bp, Artificial Sequence
  Description of Artificial Sequence:  Hypothetical Probe Sequence
cacgaggacctacacgccat

SEQ ID NO: 5606 - DNA, 20 bp, Artificial Sequence
  Description of Artificial Sequence:  Hypothetical Probe Sequence
cttgcagctgatacgggcaa

SEQ ID NO: 5607 - DNA, 20 bp, Artificial Sequence
  Description of Artificial Sequence:  Hypothetical Probe Sequence
cagcaatcgtgcatcgagcc

SEQ ID NO: 5608 - DNA, 20 bp, Artificial Sequence
  Description of Artificial Sequence:  Hypothetical Probe Sequence
cagcctcaggtatcccccat

SEQ ID NO: 5609 - DNA, 20 bp, Artificial Sequence
  Description of Artificial Sequence:  Hypothetical Probe Sequence
cttgcagcggtaatcgtgcg

SEQ ID NO: 5610 - DNA, 20 bp, Artificial Sequence
  Description of Artificial Sequence:  Hypothetical Probe Sequence
cagcgtctaaagacggctca

SEQ ID NO: 5611 - DNA, 20 bp, Artificial Sequence
  Description of Artificial Sequence:  Hypothetical Probe Sequence
cagcgacctacagtgccagc

SEQ ID NO: 5612 - DNA, 20 bp, Artificial Sequence
  Description of Artificial Sequence:  Hypothetical Probe Sequence
gaccttgagaccacgggcaa

SEQ ID NO: 5613 - DNA, 20 bp, Artificial Sequence
  Description of Artificial Sequence:  Hypothetical Probe Sequence
gaccaggacctaacggacgg

SEQ ID NO: 5614 - DNA, 20 bp, Artificial Sequence
  Description of Artificial Sequence:  Hypothetical Probe Sequence
gaccggaccctagatgccat

SEQ ID NO: 5615 - DNA, 20 bp, Artificial Sequence
  Description of Artificial Sequence:  Hypothetical Probe Sequence
cttggtgcggtactcaagcc

SEQ ID NO: 5616 - DNA, 20 bp, Artificial Sequence
  Description of Artificial Sequence:  Hypothetical Probe Sequence
gtgcgtcttcgtgtgccgaa

SEQ ID NO: 5617 - DNA, 20 bp, Artificial Sequence
  Description of Artificial Sequence:  Hypothetical Probe Sequence
gtgcgagtaatcgacccgtt

SEQ ID NO: 5618 - DNA, 20 bp, Artificial Sequence
  Description of Artificial Sequence:  Hypothetical Probe Sequence
cttggtgcggactctgtgcg

SEQ ID NO: 5619 - DNA, 20 bp, Artificial Sequence
  Description of Artificial Sequence:  Hypothetical Probe Sequence
ggacatcgaggagcttgcaa

SEQ ID NO: 5620 - DNA, 20 bp, Artificial Sequence
  Description of Artificial Sequence:  Hypothetical Probe Sequence
cttgggacgacccgttgctt

SEQ ID NO: 5621 - DNA, 20 bp, Artificial Sequence
  Description of Artificial Sequence:  Hypothetical Probe Sequence
acgggagtagccacggggta

SEQ ID NO: 5622 - DNA, 20 bp, Artificial Sequence
  Description of Artificial Sequence:  Hypothetical Probe Sequence
acggacctcacggaccctgt

SEQ ID NO: 5623 - DNA, 20 bp, Artificial Sequence
  Description of Artificial Sequence:  Hypothetical Probe Sequence
acggaggatcgtagccggac

SEQ ID NO: 5624 - DNA, 20 bp, Artificial Sequence
  Description of Artificial Sequence:  Hypothetical Probe Sequence
acgggatgggtaaggatgcg

SEQ ID NO: 5625 - DNA, 20 bp, Artificial Sequence
  Description of Artificial Sequence:  Hypothetical Probe Sequence
agccttgactcatcccgcaa

SEQ ID NO: 5626 - DNA, 20 bp, Artificial Sequence
  Description of Artificial Sequence:  Hypothetical Probe Sequence
agcctgatagcctgcgacgg

SEQ ID NO: 5627 - DNA, 20 bp, Artificial Sequence
  Description of Artificial Sequence:  Hypothetical Probe Sequence
agccgagtgtgctgattgcg

SEQ ID NO: 5628 - DNA, 20 bp, Artificial Sequence
  Description of Artificial Sequence:  Hypothetical Probe Sequence
agcctccctgatccatacgg

SEQ ID NO: 5629 - DNA, 20 bp, Artificial Sequence
  Description of Artificial Sequence:  Hypothetical Probe Sequence
agcccagcggactacatgcg

SEQ ID NO: 5630 - DNA, 20 bp, Artificial Sequence
  Description of Artificial Sequence:  Hypothetical Probe Sequence
agccggacgagttcgtagcc

SEQ ID NO: 5631 - DNA, 20 bp, Artificial Sequence
  Description of Artificial Sequence:  Hypothetical Probe Sequence
ttgaatcgggacgtgcagga

SEQ ID NO: 5632 - DNA, 20 bp, Artificial Sequence
  Description of Artificial Sequence:  Hypothetical Probe Sequence
tgatcacgctcatgcgcagc

SEQ ID NO: 5633 - DNA, 20 bp, Artificial Sequence
  Description of Artificial Sequence:  Hypothetical Probe Sequence
ttaggcaagatgggaccgtt

SEQ ID NO: 5634 - DNA, 20 bp, Artificial Sequence
  Description of Artificial Sequence:  Hypothetical Probe Sequence
aatcgcaagctttgtcgtgc

SEQ ID NO: 5635 - DNA, 20 bp, Artificial Sequence
  Description of Artificial Sequence:  Hypothetical Probe Sequence
aatctccccacgtcccgtgc

SEQ ID NO: 5636 - DNA, 20 bp, Artificial Sequence
  Description of Artificial Sequence:  Hypothetical Probe Sequence
aatccacgctcaagccagcc

SEQ ID NO: 5637 - DNA, 20 bp, Artificial Sequence
  Description of Artificial Sequence:  Hypothetical Probe Sequence
aaagccattcccaaagcacg

SEQ ID NO: 5638 - DNA, 20 bp, Artificial Sequence
  Description of Artificial Sequence:  Hypothetical Probe Sequence
tctgcgttggtaaggagcaa

SEQ ID NO: 5639 - DNA, 20 bp, Artificial Sequence
  Description of Artificial Sequence:  Hypothetical Probe Sequence
tctggcaattagcttgcgaa

SEQ ID NO: 5640 - DNA, 20 bp, Artificial Sequence
  Description of Artificial Sequence:  Hypothetical Probe Sequence
tctgggacaatcgcaatccc

SEQ ID NO: 5641 - DNA, 20 bp, Artificial Sequence
  Description of Artificial Sequence:  Hypothetical Probe Sequence
cgtttctgagccggacagcc

SEQ ID NO: 5642 - DNA, 20 bp, Artificial Sequence
  Description of Artificial Sequence:  Hypothetical Probe Sequence
tgtcccatcacgtgtctgcg

SEQ ID NO: 5643 - DNA, 20 bp, Artificial Sequence
  Description of Artificial Sequence:  Hypothetical Probe Sequence
tgtcgtcttgcgggtatgcg

SEQ ID NO: 5644 - DNA, 20 bp, Artificial Sequence
  Description of Artificial Sequence:  Hypothetical Probe Sequence
tgtcatcgcgttcacgtccc

SEQ ID NO: 5645 - DNA, 20 bp, Artificial Sequence
  Description of Artificial Sequence:  Hypothetical Probe Sequence
tgtcgatgccataccttgcg

SEQ ID NO: 5646 - DNA, 20 bp, Artificial Sequence
  Description of Artificial Sequence:  Hypothetical Probe Sequence
cgtttcgtaaagcgaatgcg

SEQ ID NO: 5647 - DNA, 20 bp, Artificial Sequence
  Description of Artificial Sequence:  Hypothetical Probe Sequence
cgtttcgtggtaacggcgtt

SEQ ID NO: 5648 - DNA, 20 bp, Artificial Sequence
  Description of Artificial Sequence:  Hypothetical Probe Sequence
tcgtacggaaagcttgccat

SEQ ID NO: 5649 - DNA, 20 bp, Artificial Sequence
  Description of Artificial Sequence:  Hypothetical Probe Sequence
cttgcagccgttccatgcaa

SEQ ID NO: 5650 - DNA, 20 bp, Artificial Sequence
  Description of Artificial Sequence:  Hypothetical Probe Sequence
cgttttgagcaatcccatcg

SEQ ID NO: 5651 - DNA, 20 bp, Artificial Sequence
  Description of Artificial Sequence:  Hypothetical Probe Sequence
cgttaaagacggtcccgtgc

SEQ ID NO: 5652 - DNA, 20 bp, Artificial Sequence
  Description of Artificial Sequence:  Hypothetical Probe Sequence
cgttcgaaaaagaggatgcg

SEQ ID NO: 5653 - DNA, 20 bp, Artificial Sequence
  Description of Artificial Sequence:  Hypothetical Probe Sequence
cgttcgttgtcttgcgtgcg

SEQ ID NO: 5654 - DNA, 20 bp, Artificial Sequence
  Description of Artificial Sequence:  Hypothetical Probe Sequence
ctcaatcggacccacgcgaa

SEQ ID NO: 5655 - DNA, 20 bp, Artificial Sequence
  Description of Artificial Sequence:  Hypothetical Probe Sequence
cgttctcaacgggacccttg

SEQ ID NO: 5656 - DNA, 20 bp, Artificial Sequence
  Description of Artificial Sequence:  Hypothetical Probe Sequence
ctgttcgtaggaacggacgg

SEQ ID NO: 5657 - DNA, 20 bp, Artificial Sequence
  Description of Artificial Sequence:  Hypothetical Probe Sequence
ccattgtcgaccagcccagc

SEQ ID NO: 5658 - DNA, 20 bp, Artificial Sequence
  Description of Artificial Sequence:  Hypothetical Probe Sequence
ccatccatcgaactgttgcg

SEQ ID NO: 5659 - DNA, 20 bp, Artificial Sequence
  Description of Artificial Sequence:  Hypothetical Probe Sequence
cgttccatatcgccattgcg

SEQ ID NO: 5660 - DNA, 20 bp, Artificial Sequence
  Description of Artificial Sequence:  Hypothetical Probe Sequence
ccatgatgtgatcagcgcaa

SEQ ID NO: 5661 - DNA, 20 bp, Artificial Sequence
  Description of Artificial Sequence:  Hypothetical Probe Sequence
ccatgaccaatcgatgcgaa

SEQ ID NO: 5662 - DNA, 20 bp, Artificial Sequence
  Description of Artificial Sequence:  Hypothetical Probe Sequence
cgttccatggacgcaaacct

SEQ ID NO: 5663 - DNA, 20 bp, Artificial Sequence
  Description of Artificial Sequence:  Hypothetical Probe Sequence
cgttccatacggagcctctg

SEQ ID NO: 5664 - DNA, 20 bp, Artificial Sequence
  Description of Artificial Sequence:  Hypothetical Probe Sequence
cgttcgaatcgtagccgatg

SEQ ID NO: 5665 - DNA, 20 bp, Artificial Sequence
  Description of Artificial Sequence:  Hypothetical Probe Sequence
cgaacttgcacggcttgacc

SEQ ID NO: 5666 - DNA, 20 bp, Artificial Sequence
  Description of Artificial Sequence:  Hypothetical Probe Sequence
cgaactcagatgtcccgtgc

SEQ ID NO: 5667 - DNA, 20 bp, Artificial Sequence
  Description of Artificial Sequence:  Hypothetical Probe Sequence
cgttcgaagagttgcggctt

SEQ ID NO: 5668 - DNA, 20 bp, Artificial Sequence
  Description of Artificial Sequence:  Hypothetical Probe Sequence
cgaaatcgtacaacggagcc

SEQ ID NO: 5669 - DNA, 20 bp, Artificial Sequence
  Description of Artificial Sequence:  Hypothetical Probe Sequence
cgttcgaagaccgacccacg

SEQ ID NO: 5670 - DNA, 20 bp, Artificial Sequence
  Description of Artificial Sequence:  Hypothetical Probe Sequence
gcttgtctacggggacgacc

SEQ ID NO: 5671 - DNA, 20 bp, Artificial Sequence
  Description of Artificial Sequence:  Hypothetical Probe Sequence
gtctcgttatcggtcttgcg

SEQ ID NO: 5672 - DNA, 20 bp, Artificial Sequence
  Description of Artificial Sequence:  Hypothetical Probe Sequence
gagttcgtgcaaacgggcaa

SEQ ID NO: 5673 - DNA, 20 bp, Artificial Sequence
  Description of Artificial Sequence:  Hypothetical Probe Sequence
gagtcagccgaacgtttccc

SEQ ID NO: 5674 - DNA, 20 bp, Artificial Sequence
  Description of Artificial Sequence:  Hypothetical Probe Sequence
cgttgagtggacgatgcagc

SEQ ID NO: 5675 - DNA, 20 bp, Artificial Sequence
  Description of Artificial Sequence:  Hypothetical Probe Sequence
cgttgcaatgatgctttgcg

SEQ ID NO: 5676 - DNA, 20 bp, Artificial Sequence
  Description of Artificial Sequence:  Hypothetical Probe Sequence
gcaacgaacgaaaatcgacc

SEQ ID NO: 5677 - DNA, 20 bp, Artificial Sequence
  Description of Artificial Sequence:  Hypothetical Probe Sequence
gcaaggtagacctgcggacc

SEQ ID NO: 5678 - DNA, 20 bp, Artificial Sequence
  Description of Artificial Sequence:  Hypothetical Probe Sequence
gcaagagtaaagtgcgcgtt

SEQ ID NO: 5679 - DNA, 20 bp, Artificial Sequence
  Description of Artificial Sequence:  Hypothetical Probe Sequence
gcaaacctcctagcaaacgg

SEQ ID NO: 5680 - DNA, 20 bp, Artificial Sequence
  Description of Artificial Sequence:  Hypothetical Probe Sequence
cgttgcaacagcacctctgt

SEQ ID NO: 5681 - DNA, 20 bp, Artificial Sequence
  Description of Artificial Sequence:  Hypothetical Probe Sequence
cgttgcaaagccgctttaca

SEQ ID NO: 5682 - DNA, 20 bp, Artificial Sequence
  Description of Artificial Sequence:  Hypothetical Probe Sequence
agtgcacgggacaccttccc

SEQ ID NO: 5683 - DNA, 20 bp, Artificial Sequence
  Description of Artificial Sequence:  Hypothetical Probe Sequence
agtgcagccagcggacgctt

SEQ ID NO: 5684 - DNA, 20 bp, Artificial Sequence
  Description of Artificial Sequence:  Hypothetical Probe Sequence
agtggtgccacggacccgaa

SEQ ID NO: 5685 - DNA, 20 bp, Artificial Sequence
  Description of Artificial Sequence:  Hypothetical Probe Sequence
acctgacctgcgcgttgcaa

SEQ ID NO: 5686 - DNA, 20 bp, Artificial Sequence
  Description of Artificial Sequence:  Hypothetical Probe Sequence
atcgctgtcagcgtgcccat

SEQ ID NO: 5687 - DNA, 20 bp, Artificial Sequence
  Description of Artificial Sequence:  Hypothetical Probe Sequence
atcgggtatcgtgacccgaa

SEQ ID NO: 5688 - DNA, 20 bp, Artificial Sequence
  Description of Artificial Sequence:  Hypothetical Probe Sequence
atcggacctctgggacgctt

SEQ ID NO: 5689 - DNA, 20 bp, Artificial Sequence
  Description of Artificial Sequence:  Hypothetical Probe Sequence
aggatgcgtacagtgcgtgc

SEQ ID NO: 5690 - DNA, 20 bp, Artificial Sequence
  Description of Artificial Sequence:  Hypothetical Probe Sequence
aggaagccggtaggactgcg

SEQ ID NO: 5691 - DNA, 20 bp, Artificial Sequence
  Description of Artificial Sequence:  Hypothetical Probe Sequence
gatgcgttaatcggactccc

SEQ ID NO: 5692 - DNA, 20 bp, Artificial Sequence
  Description of Artificial Sequence:  Hypothetical Probe Sequence
cgttgatggaccgtgcccta

SEQ ID NO: 5693 - DNA, 20 bp, Artificial Sequence
  Description of Artificial Sequence:  Hypothetical Probe Sequence
cgttgatgggacgacccacg

SEQ ID NO: 5694 - DNA, 20 bp, Artificial Sequence
  Description of Artificial Sequence:  Hypothetical Probe Sequence
tcccagtgggtacacggtgc

SEQ ID NO: 5695 - DNA, 20 bp, Artificial Sequence
  Description of Artificial Sequence:  Hypothetical Probe Sequence
tccccctaaatcccatcagc

SEQ ID NO: 5696 - DNA, 20 bp, Artificial Sequence
  Description of Artificial Sequence:  Hypothetical Probe Sequence
cgtttccctccctcgtcgaa

SEQ ID NO: 5697 - DNA, 20 bp, Artificial Sequence
  Description of Artificial Sequence:  Hypothetical Probe Sequence
tccctgcgccatggtacgaa

SEQ ID NO: 5698 - DNA, 20 bp, Artificial Sequence
  Description of Artificial Sequence:  Hypothetical Probe Sequence
tgcgatacagcctcccctca

SEQ ID NO: 5699 - DNA, 20 bp, Artificial Sequence
  Description of Artificial Sequence:  Hypothetical Probe Sequence
tgcgcgaatgcgttagcttg

SEQ ID NO: 5700 - DNA, 20 bp, Artificial Sequence
  Description of Artificial Sequence:  Hypothetical Probe Sequence
cgtttgcggcttgtgcctca

SEQ ID NO: 5701 - DNA, 20 bp, Artificial Sequence
  Description of Artificial Sequence:  Hypothetical Probe Sequence
tgcggtcttacacacgcgaa

SEQ ID NO: 5702 - DNA, 20 bp, Artificial Sequence
  Description of Artificial Sequence:  Hypothetical Probe Sequence
tgcgaggaatcgttagcgaa

SEQ ID NO: 5703 - DNA, 20 bp, Artificial Sequence
  Description of Artificial Sequence:  Hypothetical Probe Sequence
cgtttgcggatgccatgctt

SEQ ID NO: 5704 - DNA, 20 bp, Artificial Sequence
  Description of Artificial Sequence:  Hypothetical Probe Sequence
tgcgtcccttgagcttcagc

SEQ ID NO: 5705 - DNA, 20 bp, Artificial Sequence
  Description of Artificial Sequence:  Hypothetical Probe Sequence
cgtttgcgcacgcgttgctt

SEQ ID NO: 5706 - DNA, 20 bp, Artificial Sequence
  Description of Artificial Sequence:  Hypothetical Probe Sequence
cacgtcgttgtccagcggta

SEQ ID NO: 5707 - DNA, 20 bp, Artificial Sequence
  Description of Artificial Sequence:  Hypothetical Probe Sequence
cacgcttgtgatccatcgaa

SEQ ID NO: 5708 - DNA, 20 bp, Artificial Sequence
  Description of Artificial Sequence:  Hypothetical Probe Sequence
cgttcacgctgtcttgtgcg

SEQ ID NO: 5709 - DNA, 20 bp, Artificial Sequence
  Description of Artificial Sequence:  Hypothetical Probe Sequence
cacggatgttagcgaatccc

SEQ ID NO: 5710 - DNA, 20 bp, Artificial Sequence
  Description of Artificial Sequence:  Hypothetical Probe Sequence
cgttcacgcagcgcaatcgt

SEQ ID NO: 5711 - DNA, 20 bp, Artificial Sequence
  Description of Artificial Sequence:  Hypothetical Probe Sequence
cacggaccaaagttagtgcg

SEQ ID NO: 5712 - DNA, 20 bp, Artificial Sequence
  Description of Artificial Sequence:  Hypothetical Probe Sequence
cgttcacgacgggtctgcaa

SEQ ID NO: 5713 - DNA, 20 bp, Artificial Sequence
  Description of Artificial Sequence:  Hypothetical Probe Sequence
cgttcacgagcctcgtcacg

SEQ ID NO: 5714 - DNA, 20 bp, Artificial Sequence
  Description of Artificial Sequence:  Hypothetical Probe Sequence
cagctctggaccaaagctca

SEQ ID NO: 5715 - DNA, 20 bp, Artificial Sequence
  Description of Artificial Sequence:  Hypothetical Probe Sequence
cgttcagcgcttcgtttctg

SEQ ID NO: 5716 - DNA, 20 bp, Artificial Sequence
  Description of Artificial Sequence:  Hypothetical Probe Sequence
cgttcagccacgcagcagga

SEQ ID NO: 5717 - DNA, 20 bp, Artificial Sequence
  Description of Artificial Sequence:  Hypothetical Probe Sequence
cagcgtgcttgaaatcgtgc

SEQ ID NO: 5718 - DNA, 20 bp, Artificial Sequence
  Description of Artificial Sequence:  Hypothetical Probe Sequence
cgttgacctctgtccccagc

SEQ ID NO: 5719 - DNA, 20 bp, Artificial Sequence
  Description of Artificial Sequence:  Hypothetical Probe Sequence
cgttgaccctgtcgaacgaa

SEQ ID NO: 5720 - DNA, 20 bp, Artificial Sequence
  Description of Artificial Sequence:  Hypothetical Probe Sequence
cgttgaccatcgttagcacg

SEQ ID NO: 5721 - DNA, 20 bp, Artificial Sequence
  Description of Artificial Sequence:  Hypothetical Probe Sequence
gacctgcgctcaggtaagcc

SEQ ID NO: 5722 - DNA, 20 bp, Artificial Sequence
  Description of Artificial Sequence:  Hypothetical Probe Sequence
cgttgacccagctcccgtct

SEQ ID NO: 5723 - DNA, 20 bp, Artificial Sequence
  Description of Artificial Sequence:  Hypothetical Probe Sequence
gtgctgtccttgcagctgcg

SEQ ID NO: 5724 - DNA, 20 bp, Artificial Sequence
  Description of Artificial Sequence:  Hypothetical Probe Sequence
gtgccttgtacacagcgacc

SEQ ID NO: 5725 - DNA, 20 bp, Artificial Sequence
  Description of Artificial Sequence:  Hypothetical Probe Sequence
gtgcctcaaaagtccccagc

SEQ ID NO: 5726 - DNA, 20 bp, Artificial Sequence
  Description of Artificial Sequence:  Hypothetical Probe Sequence
cgttgtgcgatgtgtcgctt

SEQ ID NO: 5727 - DNA, 20 bp, Artificial Sequence
  Description of Artificial Sequence:  Hypothetical Probe Sequence
gtgcgaccgtctatcgtgcg

SEQ ID NO: 5728 - DNA, 20 bp, Artificial Sequence
  Description of Artificial Sequence:  Hypothetical Probe Sequence
cgttggaccgttggaccgaa

SEQ ID NO: 5729 - DNA, 20 bp, Artificial Sequence
  Description of Artificial Sequence:  Hypothetical Probe Sequence
ggacggtacgaagcttcacg

SEQ ID NO: 5730 - DNA, 20 bp, Artificial Sequence
  Description of Artificial Sequence:  Hypothetical Probe Sequence
ggacaggatgtcacggcagc

SEQ ID NO: 5731 - DNA, 20 bp, Artificial Sequence
  Description of Artificial Sequence:  Hypothetical Probe Sequence
ggacggacttgaagtgtgcg

SEQ ID NO: 5732 - DNA, 20 bp, Artificial Sequence
  Description of Artificial Sequence:  Hypothetical Probe Sequence
ggacacggccatctgtgcaa

SEQ ID NO: 5733 - DNA, 20 bp, Artificial Sequence
  Description of Artificial Sequence:  Hypothetical Probe Sequence
acggttgaacctggacgtgc

SEQ ID NO: 5734 - DNA, 20 bp, Artificial Sequence
  Description of Artificial Sequence:  Hypothetical Probe Sequence
acggaatccttgcacgctca

SEQ ID NO: 5735 - DNA, 20 bp, Artificial Sequence
  Description of Artificial Sequence:  Hypothetical Probe Sequence
acggaaaggaccgaccatcg

SEQ ID NO: 5736 - DNA, 20 bp, Artificial Sequence
  Description of Artificial Sequence:  Hypothetical Probe Sequence
acggtctggaccgcaaggac

SEQ ID NO: 5737 - DNA, 20 bp, Artificial Sequence
  Description of Artificial Sequence:  Hypothetical Probe Sequence
acggctgtcttgtcccgacc

SEQ ID NO: 5738 - DNA, 20 bp, Artificial Sequence
  Description of Artificial Sequence:  Hypothetical Probe Sequence
acgggagtttgattgatgcg

SEQ ID NO: 5739 - DNA, 20 bp, Artificial Sequence
  Description of Artificial Sequence:  Hypothetical Probe Sequence
acgggatgcagcagtgcgaa

SEQ ID NO: 5740 - DNA, 20 bp, Artificial Sequence
  Description of Artificial Sequence:  Hypothetical Probe Sequence
agccttgagtgccttgcacg

SEQ ID NO: 5741 - DNA, 20 bp, Artificial Sequence
  Description of Artificial Sequence:  Hypothetical Probe Sequence
agcctgattgcgcagccttg

SEQ ID NO: 5742 - DNA, 20 bp, Artificial Sequence
  Description of Artificial Sequence:  Hypothetical Probe Sequence
agccgacctgtcatcgcttg

SEQ ID NO: 5743 - DNA, 20 bp, Artificial Sequence
  Description of Artificial Sequence:  Hypothetical Probe Sequence
agccacggctcaaatcgacc

SEQ ID NO: 5744 - DNA, 20 bp, Artificial Sequence
  Description of Artificial Sequence:  Hypothetical Probe Sequence
ttgaagcctcgtacggtgcg

SEQ ID NO: 5745 - DNA, 20 bp, Artificial Sequence
  Description of Artificial Sequence:  Hypothetical Probe Sequence
aatcgcttcagcagcctgcg

SEQ ID NO: 5746 - DNA, 20 bp, Artificial Sequence
  Description of Artificial Sequence:  Hypothetical Probe Sequence
aaagcgttgtgccagcagcc

SEQ ID NO: 5747 - DNA, 20 bp, Artificial Sequence
  Description of Artificial Sequence:  Hypothetical Probe Sequence
tgtctgcgcagctgcggtct

SEQ ID NO: 5748 - DNA, 20 bp, Artificial Sequence
  Description of Artificial Sequence:  Hypothetical Probe Sequence
tcgtcacgggactgcggcaa

SEQ ID NO: 5749 - DNA, 20 bp, Artificial Sequence
  Description of Artificial Sequence:  Hypothetical Probe Sequence
tcgtagccaggagtgccgaa

SEQ ID NO: 5750 - DNA, 20 bp, Artificial Sequence
  Description of Artificial Sequence:  Hypothetical Probe Sequence
cttgagtgcgttcgtttgcg

SEQ ID NO: 5751 - DNA, 20 bp, Artificial Sequence
  Description of Artificial Sequence:  Hypothetical Probe Sequence
cgtttcgtgacctgtctgcg

SEQ ID NO: 5752 - DNA, 20 bp, Artificial Sequence
  Description of Artificial Sequence:  Hypothetical Probe Sequence
cgttacggcgaaaggaacgg

SEQ ID NO: 5753 - DNA, 20 bp, Artificial Sequence
  Description of Artificial Sequence:  Hypothetical Probe Sequence
ctcaacggcgaatgcgccat

SEQ ID NO: 5754 - DNA, 20 bp, Artificial Sequence
  Description of Artificial Sequence:  Hypothetical Probe Sequence
ccatgcttggacggacacgg

SEQ ID NO: 5755 - DNA, 20 bp, Artificial Sequence
  Description of Artificial Sequence:  Hypothetical Probe Sequence
ccattgcgaaaggaccctgt

SEQ ID NO: 5756 - DNA, 20 bp, Artificial Sequence
  Description of Artificial Sequence:  Hypothetical Probe Sequence
cgaaatcgatcgcagctgcg

SEQ ID NO: 5757 - DNA, 20 bp, Artificial Sequence
  Description of Artificial Sequence:  Hypothetical Probe Sequence
cgaacacgaggaacggtccc

SEQ ID NO: 5758 - DNA, 20 bp, Artificial Sequence
  Description of Artificial Sequence:  Hypothetical Probe Sequence
cgaacagcacggcacggtgc

SEQ ID NO: 5759 - DNA, 20 bp, Artificial Sequence
  Description of Artificial Sequence:  Hypothetical Probe Sequence
gcaaacggacggaaagggac

SEQ ID NO: 5760 - DNA, 20 bp, Artificial Sequence
  Description of Artificial Sequence:  Hypothetical Probe Sequence
agtggtgccgaagtgctgcg

SEQ ID NO: 5761 - DNA, 20 bp, Artificial Sequence
  Description of Artificial Sequence:  Hypothetical Probe Sequence
acctacggtgcggaccgtgc

SEQ ID NO: 5762 - DNA, 20 bp, Artificial Sequence
  Description of Artificial Sequence:  Hypothetical Probe Sequence
ctcaatcgcttggcaaacgg

SEQ ID NO: 5763 - DNA, 20 bp, Artificial Sequence
  Description of Artificial Sequence:  Hypothetical Probe Sequence
ctcaatcgccatcacgcgtt

SEQ ID NO: 5764 - DNA, 20 bp, Artificial Sequence
  Description of Artificial Sequence:  Hypothetical Probe Sequence
atcgggtagcttcagcgtgc

SEQ ID NO: 5765 - DNA, 20 bp, Artificial Sequence
  Description of Artificial Sequence:  Hypothetical Probe Sequence
atcgacgggtctggacacgg

SEQ ID NO: 5766 - DNA, 20 bp, Artificial Sequence
  Description of Artificial Sequence:  Hypothetical Probe Sequence
aggagcttcagccagccgaa

SEQ ID NO: 5767 - DNA, 20 bp, Artificial Sequence
  Description of Artificial Sequence:  Hypothetical Probe Sequence
aggacacggtgccacgacgg

SEQ ID NO: 5768 - DNA, 20 bp, Artificial Sequence
  Description of Artificial Sequence:  Hypothetical Probe Sequence
tcccgcttgcaaccatgacc

SEQ ID NO: 5769 - DNA, 20 bp, Artificial Sequence
  Description of Artificial Sequence:  Hypothetical Probe Sequence
tgcgaatcatcgcagccacg

SEQ ID NO: 5770 - DNA, 20 bp, Artificial Sequence
  Description of Artificial Sequence:  Hypothetical Probe Sequence
tgcgtctgagcctgcggtct

SEQ ID NO: 5771 - DNA, 20 bp, Artificial Sequence
  Description of Artificial Sequence:  Hypothetical Probe Sequence
tgcgctcaggaccgtttgat

SEQ ID NO: 5772 - DNA, 20 bp, Artificial Sequence
  Description of Artificial Sequence:  Hypothetical Probe Sequence
tgcggtctagcccttgtcgt

SEQ ID NO: 5773 - DNA, 20 bp, Artificial Sequence
  Description of Artificial Sequence:  Hypothetical Probe Sequence
tgcgtccccctacctaacgg

SEQ ID NO: 5774 - DNA, 20 bp, Artificial Sequence
  Description of Artificial Sequence:  Hypothetical Probe Sequence
tgcggaccgcttgacctcgt

SEQ ID NO: 5775 - DNA, 20 bp, Artificial Sequence
  Description of Artificial Sequence:  Hypothetical Probe Sequence
cacgcctaggacacggcagc

SEQ ID NO: 5776 - DNA, 20 bp, Artificial Sequence
  Description of Artificial Sequence:  Hypothetical Probe Sequence
cacgcagcgtgcctcacacg

SEQ ID NO: 5777 - DNA, 20 bp, Artificial Sequence
  Description of Artificial Sequence:  Hypothetical Probe Sequence
cacggaccgtctgcaatgcg

SEQ ID NO: 5778 - DNA, 20 bp, Artificial Sequence
  Description of Artificial Sequence:  Hypothetical Probe Sequence
cagcatcgagccacggcgaa

SEQ ID NO: 5779 - DNA, 20 bp, Artificial Sequence
  Description of Artificial Sequence:  Hypothetical Probe Sequence
cagctgcgggacaggagcaa

SEQ ID NO: 5780 - DNA, 20 bp, Artificial Sequence
  Description of Artificial Sequence:  Hypothetical Probe Sequence
gaccgatggtctccattgcg

SEQ ID NO: 5781 - DNA, 20 bp, Artificial Sequence
  Description of Artificial Sequence:  Hypothetical Probe Sequence
gaccgtgcgagtagcctgcg

SEQ ID NO: 5782 - DNA, 20 bp, Artificial Sequence
  Description of Artificial Sequence:  Hypothetical Probe Sequence
ggacgatgcacgtcccggac

SEQ ID NO: 5783 - DNA, 20 bp, Artificial Sequence
  Description of Artificial Sequence:  Hypothetical Probe Sequence
ggacggacccatagccccat

SEQ ID NO: 5784 - DNA, 20 bp, Artificial Sequence
  Description of Artificial Sequence:  Hypothetical Probe Sequence
acggccataaaggcaagacc

SEQ ID NO: 5785 - DNA, 20 bp, Artificial Sequence
  Description of Artificial Sequence:  Hypothetical Probe Sequence
acgggtctccatttgaagcc

SEQ ID NO: 5786 - DNA, 20 bp, Artificial Sequence
  Description of Artificial Sequence:  Hypothetical Probe Sequence
acggatcggacctgtccacg

SEQ ID NO: 5787 - DNA, 20 bp, Artificial Sequence
  Description of Artificial Sequence:  Hypothetical Probe Sequence
acggaggaaaagtgcggcaa

SEQ ID NO: 5788 - DNA, 20 bp, Artificial Sequence
  Description of Artificial Sequence:  Hypothetical Probe Sequence
acggcctaggacgtgcgtct

SEQ ID NO: 5789 - DNA, 20 bp, Artificial Sequence
  Description of Artificial Sequence:  Hypothetical Probe Sequence
agccttgaaatcacggcgtt

SEQ ID NO: 5790 - DNA, 20 bp, Artificial Sequence
  Description of Artificial Sequence:  Hypothetical Probe Sequence
agcctctgagcccgttccat

SEQ ID NO: 5791 - DNA, 20 bp, Artificial Sequence
  Description of Artificial Sequence:  Hypothetical Probe Sequence
ctcaagcccgttggactccc

SEQ ID NO: 5792 - DNA, 20 bp, Artificial Sequence
  Description of Artificial Sequence:  Hypothetical Probe Sequence
agccggtacgaaccatagcc

SEQ ID NO: 5793 - DNA, 20 bp, Artificial Sequence
  Description of Artificial Sequence:  Hypothetical Probe Sequence
ctcaagccgatgtccctgcg

SEQ ID NO: 5794 - DNA, 20 bp, Artificial Sequence
  Description of Artificial Sequence:  Hypothetical Probe Sequence
cgttcgttacggcagcggac

SEQ ID NO: 5795 - DNA, 20 bp, Artificial Sequence
  Description of Artificial Sequence:  Hypothetical Probe Sequence
cgttccattccctgcgggac

SEQ ID NO: 5796 - DNA, 20 bp, Artificial Sequence
  Description of Artificial Sequence:  Hypothetical Probe Sequence
cgttcagccctatgcgcagc

SEQ ID NO: 5797 - DNA, 20 bp, Artificial Sequence
  Description of Artificial Sequence:  Hypothetical Probe Sequence
ctgtcgaacgtttgcgcagc

SEQ ID NO: 5798 - DNA, 20 bp, Artificial Sequence
  Description of Artificial Sequence:  Hypothetical Probe Sequence
cgaatccccgttgaccgagt

SEQ ID NO: 5799 - DNA, 20 bp, Artificial Sequence
  Description of Artificial Sequence:  Hypothetical Probe Sequence
gcttgtgcgagtccatcacg

SEQ ID NO: 5800 - DNA, 20 bp, Artificial Sequence
  Description of Artificial Sequence:  Hypothetical Probe Sequence
gcaaccatagccggacgcaa

SEQ ID NO: 5801 - DNA, 20 bp, Artificial Sequence
  Description of Artificial Sequence:  Hypothetical Probe Sequence
gcaacgaatgtcagccacgg

SEQ ID NO: 5802 - DNA, 20 bp, Artificial Sequence
  Description of Artificial Sequence:  Hypothetical Probe Sequence
gcaagcaatctgcagccttg

SEQ ID NO: 5803 - DNA, 20 bp, Artificial Sequence
  Description of Artificial Sequence:  Hypothetical Probe Sequence
gcaagaccgcaaatcgtgcg

SEQ ID NO: 5804 - DNA, 20 bp, Artificial Sequence
  Description of Artificial Sequence:  Hypothetical Probe Sequence
gatgtgcgaatcggacgcaa

SEQ ID NO: 5805 - DNA, 20 bp, Artificial Sequence
  Description of Artificial Sequence:  Hypothetical Probe Sequence
tccccttgaggaccatcacg

SEQ ID NO: 5806 - DNA, 20 bp, Artificial Sequence
  Description of Artificial Sequence:  Hypothetical Probe Sequence
tcccgcttcctagtgcgacc

SEQ ID NO: 5807 - DNA, 20 bp, Artificial Sequence
  Description of Artificial Sequence:  Hypothetical Probe Sequence
tcccagtgcgaatcccggac

SEQ ID NO: 5808 - DNA, 20 bp, Artificial Sequence
  Description of Artificial Sequence:  Hypothetical Probe Sequence
tgcgtgtccacgcctatgcg

SEQ ID NO: 5809 - DNA, 20 bp, Artificial Sequence
  Description of Artificial Sequence:  Hypothetical Probe Sequence
tgcgcgaacttgccatggta

SEQ ID NO: 5810 - DNA, 20 bp, Artificial Sequence
  Description of Artificial Sequence:  Hypothetical Probe Sequence
tgcggctttcgtgcttttga

SEQ ID NO: 5811 - DNA, 20 bp, Artificial Sequence
  Description of Artificial Sequence:  Hypothetical Probe Sequence
tgcggagtccatcagcgctt

SEQ ID NO: 5812 - DNA, 20 bp, Artificial Sequence
  Description of Artificial Sequence:  Hypothetical Probe Sequence
tgcgaggaaaagctgttgcg

SEQ ID NO: 5813 - DNA, 20 bp, Artificial Sequence
  Description of Artificial Sequence:  Hypothetical Probe Sequence
ctgttgcgcagcacggccta

SEQ ID NO: 5814 - DNA, 20 bp, Artificial Sequence
  Description of Artificial Sequence:  Hypothetical Probe Sequence
cacgctgttcccgaccagga

SEQ ID NO: 5815 - DNA, 20 bp, Artificial Sequence
  Description of Artificial Sequence:  Hypothetical Probe Sequence
cacgccataatcgtgccacg

SEQ ID NO: 5816 - DNA, 20 bp, Artificial Sequence
  Description of Artificial Sequence:  Hypothetical Probe Sequence
cacgcgaaatacgcaacgaa

SEQ ID NO: 5817 - DNA, 20 bp, Artificial Sequence
  Description of Artificial Sequence:  Hypothetical Probe Sequence
cacgggtaacggcgaagcaa

SEQ ID NO: 5818 - DNA, 20 bp, Artificial Sequence
  Description of Artificial Sequence:  Hypothetical Probe Sequence
cacggatgggacgcaacagc

SEQ ID NO: 5819 - DNA, 20 bp, Artificial Sequence
  Description of Artificial Sequence:  Hypothetical Probe Sequence
cagcatcgcgttgcaatgcg

SEQ ID NO: 5820 - DNA, 20 bp, Artificial Sequence
  Description of Artificial Sequence:  Hypothetical Probe Sequence
cagcgatgtgcggtgcccat

SEQ ID NO: 5821 - DNA, 20 bp, Artificial Sequence
  Description of Artificial Sequence:  Hypothetical Probe Sequence
cagctgcgagtgagccgtgc

SEQ ID NO: 5822 - DNA, 20 bp, Artificial Sequence
  Description of Artificial Sequence:  Hypothetical Probe Sequence
gaccgcaaatacgaccgtgc

SEQ ID NO: 5823 - DNA, 20 bp, Artificial Sequence
  Description of Artificial Sequence:  Hypothetical Probe Sequence
gacctccccagctgcgtcgt

SEQ ID NO: 5824 - DNA, 20 bp, Artificial Sequence
  Description of Artificial Sequence:  Hypothetical Probe Sequence
ctgtgacctgcgcacgccat

SEQ ID NO: 5825 - DNA, 20 bp, Artificial Sequence
  Description of Artificial Sequence:  Hypothetical Probe Sequence
gacccacgacctacggcttg

SEQ ID NO: 5826 - DNA, 20 bp, Artificial Sequence
  Description of Artificial Sequence:  Hypothetical Probe Sequence
gtgcgcttccatcttgggac

SEQ ID NO: 5827 - DNA, 20 bp, Artificial Sequence
  Description of Artificial Sequence:  Hypothetical Probe Sequence
gtgctgcggatgatcggcaa

SEQ ID NO: 5828 - DNA, 20 bp, Artificial Sequence
  Description of Artificial Sequence:  Hypothetical Probe Sequence
gtgcggactgatcacgtgcg

SEQ ID NO: 5829 - DNA, 20 bp, Artificial Sequence
  Description of Artificial Sequence:  Hypothetical Probe Sequence
ggacggacatacggacgctt

SEQ ID NO: 5830 - DNA, 20 bp, Artificial Sequence
  Description of Artificial Sequence:  Hypothetical Probe Sequence
ggacagccctcacacgtgcg

SEQ ID NO: 5831 - DNA, 20 bp, Artificial Sequence
  Description of Artificial Sequence:  Hypothetical Probe Sequence
acggcttggaccgtgcgatg

SEQ ID NO: 5832 - DNA, 20 bp, Artificial Sequence
  Description of Artificial Sequence:  Hypothetical Probe Sequence
acggacctacgggaccacgg

SEQ ID NO: 5833 - DNA, 20 bp, Artificial Sequence
  Description of Artificial Sequence:  Hypothetical Probe Sequence
agcctcgtgcttcacgcgaa

SEQ ID NO: 5834 - DNA, 20 bp, Artificial Sequence
  Description of Artificial Sequence:  Hypothetical Probe Sequence
agccgcttatcgtgtctgcg

SEQ ID NO: 5835 - DNA, 20 bp, Artificial Sequence
  Description of Artificial Sequence:  Hypothetical Probe Sequence
agccgtcttgcgggacgtgc

SEQ ID NO: 5836 - DNA, 20 bp, Artificial Sequence
  Description of Artificial Sequence:  Hypothetical Probe Sequence
agcctcccaaagctcaacgg

SEQ ID NO: 5837 - DNA, 20 bp, Artificial Sequence
  Description of Artificial Sequence:  Hypothetical Probe Sequence
agccgacctctgcttgcagc

SEQ ID NO: 5838 - DNA, 20 bp, Artificial Sequence
  Description of Artificial Sequence:  Hypothetical Probe Sequence
ttgaggaccgaacacgacgg

SEQ ID NO: 5839 - DNA, 20 bp, Artificial Sequence
  Description of Artificial Sequence:  Hypothetical Probe Sequence
tgatgaccggaccacggcaa

SEQ ID NO: 5840 - DNA, 20 bp, Artificial Sequence
  Description of Artificial Sequence:  Hypothetical Probe Sequence
ttaggaccaaagccattgcg

SEQ ID NO: 5841 - DNA, 20 bp, Artificial Sequence
  Description of Artificial Sequence:  Hypothetical Probe Sequence
aatccgttgcttgtgcccat

SEQ ID NO: 5842 - DNA, 20 bp, Artificial Sequence
  Description of Artificial Sequence:  Hypothetical Probe Sequence
aatctcccccatcacgcgaa

SEQ ID NO: 5843 - DNA, 20 bp, Artificial Sequence
  Description of Artificial Sequence:  Hypothetical Probe Sequence
aatcagcccgaatccctccc

SEQ ID NO: 5844 - DNA, 20 bp, Artificial Sequence
  Description of Artificial Sequence:  Hypothetical Probe Sequence
aaagcttgcagcatcggcaa

SEQ ID NO: 5845 - DNA, 20 bp, Artificial Sequence
  Description of Artificial Sequence:  Hypothetical Probe Sequence
aaagacggcgaagacccgtt

SEQ ID NO: 5846 - DNA, 20 bp, Artificial Sequence
  Description of Artificial Sequence:  Hypothetical Probe Sequence
tctgaggatgcgggacggac

SEQ ID NO: 5847 - DNA, 20 bp, Artificial Sequence
  Description of Artificial Sequence:  Hypothetical Probe Sequence
tctgagcctgtcatcgcgaa

SEQ ID NO: 5848 - DNA, 20 bp, Artificial Sequence
  Description of Artificial Sequence:  Hypothetical Probe Sequence
tgtcatcgccatgaccgtgc

SEQ ID NO: 5849 - DNA, 20 bp, Artificial Sequence
  Description of Artificial Sequence:  Hypothetical Probe Sequence
tgtctgcgccatcgttggac

SEQ ID NO: 5850 - DNA, 20 bp, Artificial Sequence
  Description of Artificial Sequence:  Hypothetical Probe Sequence
tgtcacggccatgatggacc

SEQ ID NO: 5851 - DNA, 20 bp, Artificial Sequence
  Description of Artificial Sequence:  Hypothetical Probe Sequence
tcgtgctttacaagccacgg

SEQ ID NO: 5852 - DNA, 20 bp, Artificial Sequence
  Description of Artificial Sequence:  Hypothetical Probe Sequence
cttgcgaattaggtgctccc

SEQ ID NO: 5853 - DNA, 20 bp, Artificial Sequence
  Description of Artificial Sequence:  Hypothetical Probe Sequence
cgttctcatccctgcgtgcg

SEQ ID NO: 5854 - DNA, 20 bp, Artificial Sequence
  Description of Artificial Sequence:  Hypothetical Probe Sequence
cgttgcaaatacatcgtgcg

SEQ ID NO: 5855 - DNA, 20 bp, Artificial Sequence
  Description of Artificial Sequence:  Hypothetical Probe Sequence
cgttacctagccaccttgcg

SEQ ID NO: 5856 - DNA, 20 bp, Artificial Sequence
  Description of Artificial Sequence:  Hypothetical Probe Sequence
cgttatcgtgcgaaagctca

SEQ ID NO: 5857 - DNA, 20 bp, Artificial Sequence
  Description of Artificial Sequence:  Hypothetical Probe Sequence
cgttgaccgcttaggatgcg

SEQ ID NO: 5858 - DNA, 20 bp, Artificial Sequence
  Description of Artificial Sequence:  Hypothetical Probe Sequence
cgttgtgccctaggacggac

SEQ ID NO: 5859 - DNA, 20 bp, Artificial Sequence
  Description of Artificial Sequence:  Hypothetical Probe Sequence
ccatctcaacggcacgagcc

SEQ ID NO: 5860 - DNA, 20 bp, Artificial Sequence
  Description of Artificial Sequence:  Hypothetical Probe Sequence
ctgttcgtgcaatcgttgcg

SEQ ID NO: 5861 - DNA, 20 bp, Artificial Sequence
  Description of Artificial Sequence:  Hypothetical Probe Sequence
ctgttcccggtacacgtccc

SEQ ID NO: 5862 - DNA, 20 bp, Artificial Sequence
  Description of Artificial Sequence:  Hypothetical Probe Sequence
ctgtgtgcgtgcgatgtgcg

SEQ ID NO: 5863 - DNA, 20 bp, Artificial Sequence
  Description of Artificial Sequence:  Hypothetical Probe Sequence
ccatcctacagctgcgcagc

SEQ ID NO: 5864 - DNA, 20 bp, Artificial Sequence
  Description of Artificial Sequence:  Hypothetical Probe Sequence
ccatccatggacgacctgcg

SEQ ID NO: 5865 - DNA, 20 bp, Artificial Sequence
  Description of Artificial Sequence:  Hypothetical Probe Sequence
cgaatcgtcgttgatggcaa

SEQ ID NO: 5866 - DNA, 20 bp, Artificial Sequence
  Description of Artificial Sequence:  Hypothetical Probe Sequence
cgaacgttcacgagtgcagc

SEQ ID NO: 5867 - DNA, 20 bp, Artificial Sequence
  Description of Artificial Sequence:  Hypothetical Probe Sequence
cgaacgaacctacgaatgcg

SEQ ID NO: 5868 - DNA, 20 bp, Artificial Sequence
  Description of Artificial Sequence:  Hypothetical Probe Sequence
cgaaaccttgtcgaccacgg

SEQ ID NO: 5869 - DNA, 20 bp, Artificial Sequence
  Description of Artificial Sequence:  Hypothetical Probe Sequence
cgaacagcccattcgtcacg

SEQ ID NO: 5870 - DNA, 20 bp, Artificial Sequence
  Description of Artificial Sequence:  Hypothetical Probe Sequence
gcttctcaacggcagcatcg

SEQ ID NO: 5871 - DNA, 20 bp, Artificial Sequence
  Description of Artificial Sequence:  Hypothetical Probe Sequence
gcttaggaaggaatcgcgtt

SEQ ID NO: 5872 - DNA, 20 bp, Artificial Sequence
  Description of Artificial Sequence:  Hypothetical Probe Sequence
gcttcagctacatcccgtgc

SEQ ID NO: 5873 - DNA, 20 bp, Artificial Sequence
  Description of Artificial Sequence:  Hypothetical Probe Sequence
ccatgcttgacccgaagctt

SEQ ID NO: 5874 - DNA, 20 bp, Artificial Sequence
  Description of Artificial Sequence:  Hypothetical Probe Sequence
ccatgcttgtgcgaccgacc

SEQ ID NO: 5875 - DNA, 20 bp, Artificial Sequence
  Description of Artificial Sequence:  Hypothetical Probe Sequence
ggtagcttgcaaatcgcgaa

SEQ ID NO: 5876 - DNA, 20 bp, Artificial Sequence
  Description of Artificial Sequence:  Hypothetical Probe Sequence
ccatggtacagctgcgacgg

SEQ ID NO: 5877 - DNA, 20 bp, Artificial Sequence
  Description of Artificial Sequence:  Hypothetical Probe Sequence
ggtagtgcacggagccgtgc

SEQ ID NO: 5878 - DNA, 20 bp, Artificial Sequence
  Description of Artificial Sequence:  Hypothetical Probe Sequence
gtctcacgtgcgcttgtccc

SEQ ID NO: 5879 - DNA, 20 bp, Artificial Sequence
  Description of Artificial Sequence:  Hypothetical Probe Sequence
ccatgcaatcgtgcaaatcg

SEQ ID NO: 5880 - DNA, 20 bp, Artificial Sequence
  Description of Artificial Sequence:  Hypothetical Probe Sequence
ccatgcaacgaatcccaatc

SEQ ID NO: 5881 - DNA, 20 bp, Artificial Sequence
  Description of Artificial Sequence:  Hypothetical Probe Sequence
gcaagtcttcccagccggac

SEQ ID NO: 5882 - DNA, 20 bp, Artificial Sequence
  Description of Artificial Sequence:  Hypothetical Probe Sequence
gcaagagttccccagccacg

SEQ ID NO: 5883 - DNA, 20 bp, Artificial Sequence
  Description of Artificial Sequence:  Hypothetical Probe Sequence
gcaaatcgttagggacgtgc

SEQ ID NO: 5884 - DNA, 20 bp, Artificial Sequence
  Description of Artificial Sequence:  Hypothetical Probe Sequence
ccatgcaacacgatcgatcg

SEQ ID NO: 5885 - DNA, 20 bp, Artificial Sequence
  Description of Artificial Sequence:  Hypothetical Probe Sequence
ccatgcaagacccgttagcc

SEQ ID NO: 5886 - DNA, 20 bp, Artificial Sequence
  Description of Artificial Sequence:  Hypothetical Probe Sequence
ccatgcaaggacgagttccc

SEQ ID NO: 5887 - DNA, 20 bp, Artificial Sequence
  Description of Artificial Sequence:  Hypothetical Probe Sequence
ccatgcaaagccctcagcaa

SEQ ID NO: 5888 - DNA, 20 bp, Artificial Sequence
  Description of Artificial Sequence:  Hypothetical Probe Sequence
agtggacccttgctgttgcg

SEQ ID NO: 5889 - DNA, 20 bp, Artificial Sequence
  Description of Artificial Sequence:  Hypothetical Probe Sequence
accttcccataccagctgcg

SEQ ID NO: 5890 - DNA, 20 bp, Artificial Sequence
  Description of Artificial Sequence:  Hypothetical Probe Sequence
atcgggtatctggaccacgg

SEQ ID NO: 5891 - DNA, 20 bp, Artificial Sequence
  Description of Artificial Sequence:  Hypothetical Probe Sequence
atcggagtgatgtgcgggac

SEQ ID NO: 5892 - DNA, 20 bp, Artificial Sequence
  Description of Artificial Sequence:  Hypothetical Probe Sequence
atcgtccccgttcacgagga

SEQ ID NO: 5893 - DNA, 20 bp, Artificial Sequence
  Description of Artificial Sequence:  Hypothetical Probe Sequence
aggaaggatccccacgcacg

SEQ ID NO: 5894 - DNA, 20 bp, Artificial Sequence
  Description of Artificial Sequence:  Hypothetical Probe Sequence
ccatgatgcgttcagcgtct

SEQ ID NO: 5895 - DNA, 20 bp, Artificial Sequence
  Description of Artificial Sequence:  Hypothetical Probe Sequence
gatgatcggatggtgcacgg

SEQ ID NO: 5896 - DNA, 20 bp, Artificial Sequence
  Description of Artificial Sequence:  Hypothetical Probe Sequence
ccatgatgcctaggacgacc

SEQ ID NO: 5897 - DNA, 20 bp, Artificial Sequence
  Description of Artificial Sequence:  Hypothetical Probe Sequence
ccatgatgtcccgatgcgaa

SEQ ID NO: 5898 - DNA, 20 bp, Artificial Sequence
  Description of Artificial Sequence:  Hypothetical Probe Sequence
ccatgatgcagccacgccat

SEQ ID NO: 5899 - DNA, 20 bp, Artificial Sequence
  Description of Artificial Sequence:  Hypothetical Probe Sequence
tcccttagcgttcagcccat

SEQ ID NO: 5900 - DNA, 20 bp, Artificial Sequence
  Description of Artificial Sequence:  Hypothetical Probe Sequence
ccattcccctcaacgggatg

SEQ ID NO: 5901 - DNA, 20 bp, Artificial Sequence
  Description of Artificial Sequence:  Hypothetical Probe Sequence
tcccacctagtgcacgccat

SEQ ID NO: 5902 - DNA, 20 bp, Artificial Sequence
  Description of Artificial Sequence:  Hypothetical Probe Sequence
tgcgtgataatccttggcaa

SEQ ID NO: 5903 - DNA, 20 bp, Artificial Sequence
  Description of Artificial Sequence:  Hypothetical Probe Sequence
tgcgttagcgtttcccggta

SEQ ID NO: 5904 - DNA, 20 bp, Artificial Sequence
  Description of Artificial Sequence:  Hypothetical Probe Sequence
tgcgtgtcggtaaaagtgcg

SEQ ID NO: 5905 - DNA, 20 bp, Artificial Sequence
  Description of Artificial Sequence:  Hypothetical Probe Sequence
tgcgtcgtaaagtcccatcg

SEQ ID NO: 5906 - DNA, 20 bp, Artificial Sequence
  Description of Artificial Sequence:  Hypothetical Probe Sequence
tgcgaggacacggagtgtgc

SEQ ID NO: 5907 - DNA, 20 bp, Artificial Sequence
  Description of Artificial Sequence:  Hypothetical Probe Sequence
ccattgcgtgcgaatccagc

SEQ ID NO: 5908 - DNA, 20 bp, Artificial Sequence
  Description of Artificial Sequence:  Hypothetical Probe Sequence
tgcgcacggcaagagtcgaa

SEQ ID NO: 5909 - DNA, 20 bp, Artificial Sequence
  Description of Artificial Sequence:  Hypothetical Probe Sequence
tgcggacccacgtctggatg

SEQ ID NO: 5910 - DNA, 20 bp, Artificial Sequence
  Description of Artificial Sequence:  Hypothetical Probe Sequence
ccattgcggtgcggaccgtt

SEQ ID NO: 5911 - DNA, 20 bp, Artificial Sequence
  Description of Artificial Sequence:  Hypothetical Probe Sequence
ccattgcgacggccatatcg

SEQ ID NO: 5912 - DNA, 20 bp, Artificial Sequence
  Description of Artificial Sequence:  Hypothetical Probe Sequence
cacgttgaagcctgcggctt

SEQ ID NO: 5913 - DNA, 20 bp, Artificial Sequence
  Description of Artificial Sequence:  Hypothetical Probe Sequence
cacgtctggcaatcccagcc

SEQ ID NO: 5914 - DNA, 20 bp, Artificial Sequence
  Description of Artificial Sequence:  Hypothetical Probe Sequence
cacgagtgaccttcccccat

SEQ ID NO: 5915 - DNA, 20 bp, Artificial Sequence
  Description of Artificial Sequence:  Hypothetical Probe Sequence
cacgatcggcttttgatgcg

SEQ ID NO: 5916 - DNA, 20 bp, Artificial Sequence
  Description of Artificial Sequence:  Hypothetical Probe Sequence
cacgtgcgaaagatcgagcc

SEQ ID NO: 5917 - DNA, 20 bp, Artificial Sequence
  Description of Artificial Sequence:  Hypothetical Probe Sequence
cacggaccgagtgctttgcg

SEQ ID NO: 5918 - DNA, 20 bp, Artificial Sequence
  Description of Artificial Sequence:  Hypothetical Probe Sequence
cacgagccgatgagtgcacg

SEQ ID NO: 5919 - DNA, 20 bp, Artificial Sequence
  Description of Artificial Sequence:  Hypothetical Probe Sequence
cagcttgatcccccatcagc

SEQ ID NO: 5920 - DNA, 20 bp, Artificial Sequence
  Description of Artificial Sequence:  Hypothetical Probe Sequence
ccatcagccttgggaccgtt

SEQ ID NO: 5921 - DNA, 20 bp, Artificial Sequence
  Description of Artificial Sequence:  Hypothetical Probe Sequence
cagccgttttagtcccccat

SEQ ID NO: 5922 - DNA, 20 bp, Artificial Sequence
  Description of Artificial Sequence:  Hypothetical Probe Sequence
cagcagtggcaagtgcagcc

SEQ ID NO: 5923 - DNA, 20 bp, Artificial Sequence
  Description of Artificial Sequence:  Hypothetical Probe Sequence
cagcacctttagtgcggacc

SEQ ID NO: 5924 - DNA, 20 bp, Artificial Sequence
  Description of Artificial Sequence:  Hypothetical Probe Sequence
ccatcagctcccaggagacc

SEQ ID NO: 5925 - DNA, 20 bp, Artificial Sequence
  Description of Artificial Sequence:  Hypothetical Probe Sequence
gaccgagtaggaacggtgcg

SEQ ID NO: 5926 - DNA, 20 bp, Artificial Sequence
  Description of Artificial Sequence:  Hypothetical Probe Sequence
gaccaggaaatctcccgacc

SEQ ID NO: 5927 - DNA, 20 bp, Artificial Sequence
  Description of Artificial Sequence:  Hypothetical Probe Sequence
gaccgatgcttggcttcgaa

SEQ ID NO: 5928 - DNA, 20 bp, Artificial Sequence
  Description of Artificial Sequence:  Hypothetical Probe Sequence
gacctcccggtagtcttgcg

SEQ ID NO: 5929 - DNA, 20 bp, Artificial Sequence
  Description of Artificial Sequence:  Hypothetical Probe Sequence
ccatgaccagccgagtgcaa

SEQ ID NO: 5930 - DNA, 20 bp, Artificial Sequence
  Description of Artificial Sequence:  Hypothetical Probe Sequence
gtgctgatacctgtgcgcaa

SEQ ID NO: 5931 - DNA, 20 bp, Artificial Sequence
  Description of Artificial Sequence:  Hypothetical Probe Sequence
gtgcaatctgcgacgggacc

SEQ ID NO: 5932 - DNA, 20 bp, Artificial Sequence
  Description of Artificial Sequence:  Hypothetical Probe Sequence
gtgctctgcgttggacgctt

SEQ ID NO: 5933 - DNA, 20 bp, Artificial Sequence
  Description of Artificial Sequence:  Hypothetical Probe Sequence
gtgcctgtcgtttgtcacgg

SEQ ID NO: 5934 - DNA, 20 bp, Artificial Sequence
  Description of Artificial Sequence:  Hypothetical Probe Sequence
gtgcgcttcgttaatcccat

SEQ ID NO: 5935 - DNA, 20 bp, Artificial Sequence
  Description of Artificial Sequence:  Hypothetical Probe Sequence
gtgcatcgggtaaccttccc

SEQ ID NO: 5936 - DNA, 20 bp, Artificial Sequence
  Description of Artificial Sequence:  Hypothetical Probe Sequence
gtgcaggaatactccccgtt

SEQ ID NO: 5937 - DNA, 20 bp, Artificial Sequence
  Description of Artificial Sequence:  Hypothetical Probe Sequence
gtgctgcgggactctggacc

SEQ ID NO: 5938 - DNA, 20 bp, Artificial Sequence
  Description of Artificial Sequence:  Hypothetical Probe Sequence
gtgcgacccctacctatgcg

SEQ ID NO: 5939 - DNA, 20 bp, Artificial Sequence
  Description of Artificial Sequence:  Hypothetical Probe Sequence
ccatgtgcagcccacgaaag

SEQ ID NO: 5940 - DNA, 20 bp, Artificial Sequence
  Description of Artificial Sequence:  Hypothetical Probe Sequence
ccatggacggtactcatgcg

SEQ ID NO: 5941 - DNA, 20 bp, Artificial Sequence
  Description of Artificial Sequence:  Hypothetical Probe Sequence
ccatggacaggacacgagga

SEQ ID NO: 5942 - DNA, 20 bp, Artificial Sequence
  Description of Artificial Sequence:  Hypothetical Probe Sequence
ggaccacggtctcacgggac

SEQ ID NO: 5943 - DNA, 20 bp, Artificial Sequence
  Description of Artificial Sequence:  Hypothetical Probe Sequence
ccatggacgtgccagcttga

SEQ ID NO: 5944 - DNA, 20 bp, Artificial Sequence
  Description of Artificial Sequence:  Hypothetical Probe Sequence
acggaatcgcaatgcgagcc

SEQ ID NO: 5945 - DNA, 20 bp, Artificial Sequence
  Description of Artificial Sequence:  Hypothetical Probe Sequence
acggtctggcaaagccgcaa

SEQ ID NO: 5946 - DNA, 20 bp, Artificial Sequence
  Description of Artificial Sequence:  Hypothetical Probe Sequence
acggcttgcctatcccggta

SEQ ID NO: 5947 - DNA, 20 bp, Artificial Sequence
  Description of Artificial Sequence:  Hypothetical Probe Sequence
acgggcaatctgagtgcacg

SEQ ID NO: 5948 - DNA, 20 bp, Artificial Sequence
  Description of Artificial Sequence:  Hypothetical Probe Sequence
acgggaccctgtagccggta

SEQ ID NO: 5949 - DNA, 20 bp, Artificial Sequence
  Description of Artificial Sequence:  Hypothetical Probe Sequence
acgggtgctcgtccatcgtt

SEQ ID NO: 5950 - DNA, 20 bp, Artificial Sequence
  Description of Artificial Sequence:  Hypothetical Probe Sequence
ccatagccgtgcgcaacgaa

SEQ ID NO: 5951 - DNA, 20 bp, Artificial Sequence
  Description of Artificial Sequence:  Hypothetical Probe Sequence
tgattgcgccattgatgcaa

SEQ ID NO: 5952 - DNA, 20 bp, Artificial Sequence
  Description of Artificial Sequence:  Hypothetical Probe Sequence
tgatcacgctgtacgggcaa

SEQ ID NO: 5953 - DNA, 20 bp, Artificial Sequence
  Description of Artificial Sequence:  Hypothetical Probe Sequence
cgaaaatccacgacggttga

SEQ ID NO: 5954 - DNA, 20 bp, Artificial Sequence
  Description of Artificial Sequence:  Hypothetical Probe Sequence
cgaaaatcgtgcctgttgcg

SEQ ID NO: 5955 - DNA, 20 bp, Artificial Sequence
  Description of Artificial Sequence:  Hypothetical Probe Sequence
cgaaaatcggacttgatgcg

SEQ ID NO: 5956 - DNA, 20 bp, Artificial Sequence
  Description of Artificial Sequence:  Hypothetical Probe Sequence
atacgctttcccgcaatgcg

SEQ ID NO: 5957 - DNA, 20 bp, Artificial Sequence
  Description of Artificial Sequence:  Hypothetical Probe Sequence
aaagcgaaatcgttgatgcg

SEQ ID NO: 5958 - DNA, 20 bp, Artificial Sequence
  Description of Artificial Sequence:  Hypothetical Probe Sequence
cgaaaaagtccctgcggagt

SEQ ID NO: 5959 - DNA, 20 bp, Artificial Sequence
  Description of Artificial Sequence:  Hypothetical Probe Sequence
cgaaaaagcacgaaagccat

SEQ ID NO: 5960 - DNA, 20 bp, Artificial Sequence
  Description of Artificial Sequence:  Hypothetical Probe Sequence
cgaaaaagcagcggacctca

SEQ ID NO: 5961 - DNA, 20 bp, Artificial Sequence
  Description of Artificial Sequence:  Hypothetical Probe Sequence
cgaaaaaggtgccacgcagc

SEQ ID NO: 5962 - DNA, 20 bp, Artificial Sequence
  Description of Artificial Sequence:  Hypothetical Probe Sequence
cgaaaaagagccgtgcctca

SEQ ID NO: 5963 - DNA, 20 bp, Artificial Sequence
  Description of Artificial Sequence:  Hypothetical Probe Sequence
tctgtcgttgcgcgaaagcc

SEQ ID NO: 5964 - DNA, 20 bp, Artificial Sequence
  Description of Artificial Sequence:  Hypothetical Probe Sequence
tctgccataggagaccacgg

SEQ ID NO: 5965 - DNA, 20 bp, Artificial Sequence
  Description of Artificial Sequence:  Hypothetical Probe Sequence
tctgcacgtacacagccacg

SEQ ID NO: 5966 - DNA, 20 bp, Artificial Sequence
  Description of Artificial Sequence:  Hypothetical Probe Sequence
tgtcctcaagccgtgcccat

SEQ ID NO: 5967 - DNA, 20 bp, Artificial Sequence
  Description of Artificial Sequence:  Hypothetical Probe Sequence
tgtcgtctctgttgcgagcc

SEQ ID NO: 5968 - DNA, 20 bp, Artificial Sequence
  Description of Artificial Sequence:  Hypothetical Probe Sequence
cgaatcgtctgtcagcgcaa

SEQ ID NO: 5969 - DNA, 20 bp, Artificial Sequence
  Description of Artificial Sequence:  Hypothetical Probe Sequence
tcgtgcttccatagccatcg

SEQ ID NO: 5970 - DNA, 20 bp, Artificial Sequence
  Description of Artificial Sequence:  Hypothetical Probe Sequence
cttgtcgtgacccagccacg

SEQ ID NO: 5971 - DNA, 20 bp, Artificial Sequence
  Description of Artificial Sequence:  Hypothetical Probe Sequence
cgaacttggcttgacccacg

SEQ ID NO: 5972 - DNA, 20 bp, Artificial Sequence
  Description of Artificial Sequence:  Hypothetical Probe Sequence
cttgcagcagtggatgcgaa

SEQ ID NO: 5973 - DNA, 20 bp, Artificial Sequence
  Description of Artificial Sequence:  Hypothetical Probe Sequence
cgaacttggacccttgtgcg

SEQ ID NO: 5974 - DNA, 20 bp, Artificial Sequence
  Description of Artificial Sequence:  Hypothetical Probe Sequence
cgaacttggtgccagccgtt

SEQ ID NO: 5975 - DNA, 20 bp, Artificial Sequence
  Description of Artificial Sequence:  Hypothetical Probe Sequence
cttgagccgatggagtcacg

SEQ ID NO: 5976 - DNA, 20 bp, Artificial Sequence
  Description of Artificial Sequence:  Hypothetical Probe Sequence
cgaacgttgagtcgaacacg

SEQ ID NO: 5977 - DNA, 20 bp, Artificial Sequence
  Description of Artificial Sequence:  Hypothetical Probe Sequence
cgaacgttgtgctctgcagc

SEQ ID NO: 5978 - DNA, 20 bp, Artificial Sequence
  Description of Artificial Sequence:  Hypothetical Probe Sequence
ctcaccatgcaaacggcgtt

SEQ ID NO: 5979 - DNA, 20 bp, Artificial Sequence
  Description of Artificial Sequence:  Hypothetical Probe Sequence
ctcagctttgcgaggatgcg

SEQ ID NO: 5980 - DNA, 20 bp, Artificial Sequence
  Description of Artificial Sequence:  Hypothetical Probe Sequence
ctcatcccatacgcaagcaa

SEQ ID NO: 5981 - DNA, 20 bp, Artificial Sequence
  Description of Artificial Sequence:  Hypothetical Probe Sequence
ctcacagccagcgcttgtgc

SEQ ID NO: 5982 - DNA, 20 bp, Artificial Sequence
  Description of Artificial Sequence:  Hypothetical Probe Sequence
ccatcgaaccatgaccggac

SEQ ID NO: 5983 - DNA, 20 bp, Artificial Sequence
  Description of Artificial Sequence:  Hypothetical Probe Sequence
ccatatcgagtgcagcggac

SEQ ID NO: 5984 - DNA, 20 bp, Artificial Sequence
  Description of Artificial Sequence:  Hypothetical Probe Sequence
ccatcctaaatccgtttgcg

SEQ ID NO: 5985 - DNA, 20 bp, Artificial Sequence
  Description of Artificial Sequence:  Hypothetical Probe Sequence
ccatcacgttaggcaagcaa

SEQ ID NO: 5986 - DNA, 20 bp, Artificial Sequence
  Description of Artificial Sequence:  Hypothetical Probe Sequence
ccatggacctcatccctccc

SEQ ID NO: 5987 - DNA, 20 bp, Artificial Sequence
  Description of Artificial Sequence:  Hypothetical Probe Sequence
cgaaaaagaccttgcggcaa

SEQ ID NO: 5988 - DNA, 20 bp, Artificial Sequence
  Description of Artificial Sequence:  Hypothetical Probe Sequence
cgaatcgtttagcgttgcaa

SEQ ID NO: 5989 - DNA, 20 bp, Artificial Sequence
  Description of Artificial Sequence:  Hypothetical Probe Sequence
cgaagctttgatcacgcgtt

SEQ ID NO: 5990 - DNA, 20 bp, Artificial Sequence
  Description of Artificial Sequence:  Hypothetical Probe Sequence
gctttacatgcgttgatgcg

SEQ ID NO: 5991 - DNA, 20 bp, Artificial Sequence
  Description of Artificial Sequence:  Hypothetical Probe Sequence
gcttcgttcgaaggacagga

SEQ ID NO: 5992 - DNA, 20 bp, Artificial Sequence
  Description of Artificial Sequence:  Hypothetical Probe Sequence
cgaagcttcgaatcgtgcaa

SEQ ID NO: 5993 - DNA, 20 bp, Artificial Sequence
  Description of Artificial Sequence:  Hypothetical Probe Sequence
cgaagcttgtgcggacaaag

SEQ ID NO: 5994 - DNA, 20 bp, Artificial Sequence
  Description of Artificial Sequence:  Hypothetical Probe Sequence
gagtccatacggtcccagcc

SEQ ID NO: 5995 - DNA, 20 bp, Artificial Sequence
  Description of Artificial Sequence:  Hypothetical Probe Sequence
gcaattgaaccttgcgggac

SEQ ID NO: 5996 - DNA, 20 bp, Artificial Sequence
  Description of Artificial Sequence:  Hypothetical Probe Sequence
gcaaaatcagccacctacgg

SEQ ID NO: 5997 - DNA, 20 bp, Artificial Sequence
  Description of Artificial Sequence:  Hypothetical Probe Sequence
gcaaaaagccatcgtttgcg

SEQ ID NO: 5998 - DNA, 20 bp, Artificial Sequence
  Description of Artificial Sequence:  Hypothetical Probe Sequence
cgaagcaaccatacggcgtt

SEQ ID NO: 5999 - DNA, 20 bp, Artificial Sequence
  Description of Artificial Sequence:  Hypothetical Probe Sequence
gcaagatgagcctgtccacg

SEQ ID NO: 6000 - DNA, 20 bp, Artificial Sequence
  Description of Artificial Sequence:  Hypothetical Probe Sequence
agtgcttggcaacgttcacg

SEQ ID NO: 6001 - DNA, 20 bp, Artificial Sequence
  Description of Artificial Sequence:  Hypothetical Probe Sequence
agtgcgtttgcgtctggtgc

SEQ ID NO: 6002 - DNA, 20 bp, Artificial Sequence
  Description of Artificial Sequence:  Hypothetical Probe Sequence
agtgcgaatgtcagtgcgaa

SEQ ID NO: 6003 - DNA, 20 bp, Artificial Sequence
  Description of Artificial Sequence:  Hypothetical Probe Sequence
agtggcttggactcgttccc

SEQ ID NO: 6004 - DNA, 20 bp, Artificial Sequence
  Description of Artificial Sequence:  Hypothetical Probe Sequence
agtggatggacccagctgcg

SEQ ID NO: 6005 - DNA, 20 bp, Artificial Sequence
  Description of Artificial Sequence:  Hypothetical Probe Sequence
acctgagtacggtgcgcgtt

SEQ ID NO: 6006 - DNA, 20 bp, Artificial Sequence
  Description of Artificial Sequence:  Hypothetical Probe Sequence
acctgcaactgtggtatgcg

SEQ ID NO: 6007 - DNA, 20 bp, Artificial Sequence
  Description of Artificial Sequence:  Hypothetical Probe Sequence
accttgcgggtaacctcgaa

SEQ ID NO: 6008 - DNA, 20 bp, Artificial Sequence
  Description of Artificial Sequence:  Hypothetical Probe Sequence
acctgaccttgatgcgcagc

SEQ ID NO: 6009 - DNA, 20 bp, Artificial Sequence
  Description of Artificial Sequence:  Hypothetical Probe Sequence
acctgtgcgtctgaccggac

SEQ ID NO: 6010 - DNA, 20 bp, Artificial Sequence
  Description of Artificial Sequence:  Hypothetical Probe Sequence
atcggagttctgccattgcg

SEQ ID NO: 6011 - DNA, 20 bp, Artificial Sequence
  Description of Artificial Sequence:  Hypothetical Probe Sequence
aggaagtgcacggatgagcc

SEQ ID NO: 6012 - DNA, 20 bp, Artificial Sequence
  Description of Artificial Sequence:  Hypothetical Probe Sequence
aggatcccggtaggacgacc

SEQ ID NO: 6013 - DNA, 20 bp, Artificial Sequence
  Description of Artificial Sequence:  Hypothetical Probe Sequence
aggaagccagcctgtcgatg

SEQ ID NO: 6014 - DNA, 20 bp, Artificial Sequence
  Description of Artificial Sequence:  Hypothetical Probe Sequence
cctagcaatgtcgcaagcaa

SEQ ID NO: 6015 - DNA, 20 bp, Artificial Sequence
  Description of Artificial Sequence:  Hypothetical Probe Sequence
cctagtgcaatcagccgctt

SEQ ID NO: 6016 - DNA, 20 bp, Artificial Sequence
  Description of Artificial Sequence:  Hypothetical Probe Sequence
gatgtcgttgcgacggtccc

SEQ ID NO: 6017 - DNA, 20 bp, Artificial Sequence
  Description of Artificial Sequence:  Hypothetical Probe Sequence
gatggtctatcgagcccgaa

SEQ ID NO: 6018 - DNA, 20 bp, Artificial Sequence
  Description of Artificial Sequence:  Hypothetical Probe Sequence
gatgtcccctcaagccatcg

SEQ ID NO: 6019 - DNA, 20 bp, Artificial Sequence
  Description of Artificial Sequence:  Hypothetical Probe Sequence
cgaagatgcacgctgtgcaa

SEQ ID NO: 6020 - DNA, 20 bp, Artificial Sequence
  Description of Artificial Sequence:  Hypothetical Probe Sequence
cgaagatgggactcccacgg

SEQ ID NO: 6021 - DNA, 20 bp, Artificial Sequence
  Description of Artificial Sequence:  Hypothetical Probe Sequence
gatgagcctgatgtgcgcaa

SEQ ID NO: 6022 - DNA, 20 bp, Artificial Sequence
  Description of Artificial Sequence:  Hypothetical Probe Sequence
tccctgtccagcaatcgctt

SEQ ID NO: 6023 - DNA, 20 bp, Artificial Sequence
  Description of Artificial Sequence:  Hypothetical Probe Sequence
tcccgatgatacgaccggac

SEQ ID NO: 6024 - DNA, 20 bp, Artificial Sequence
  Description of Artificial Sequence:  Hypothetical Probe Sequence
tccccacgaatcagtgtgcg

SEQ ID NO: 6025 - DNA, 20 bp, Artificial Sequence
  Description of Artificial Sequence:  Hypothetical Probe Sequence
tccccagcgtgctgatcgaa

SEQ ID NO: 6026 - DNA, 20 bp, Artificial Sequence
  Description of Artificial Sequence:  Hypothetical Probe Sequence
cgaatcccacggatcgtcgt

SEQ ID NO: 6027 - DNA, 20 bp, Artificial Sequence
  Description of Artificial Sequence:  Hypothetical Probe Sequence
tgcgtgatcagcaaaggctt

SEQ ID NO: 6028 - DNA, 20 bp, Artificial Sequence
  Description of Artificial Sequence:  Hypothetical Probe Sequence
tgcgtacacagcgtgccagc

SEQ ID NO: 6029 - DNA, 20 bp, Artificial Sequence
  Description of Artificial Sequence:  Hypothetical Probe Sequence
cgaatgcgcgaacagcagga

SEQ ID NO: 6030 - DNA, 20 bp, Artificial Sequence
  Description of Artificial Sequence:  Hypothetical Probe Sequence
tgcgcagctacagacccacg

SEQ ID NO: 6031 - DNA, 20 bp, Artificial Sequence
  Description of Artificial Sequence:  Hypothetical Probe Sequence
cacgtctgtctggtgccgaa

SEQ ID NO: 6032 - DNA, 20 bp, Artificial Sequence
  Description of Artificial Sequence:  Hypothetical Probe Sequence
cacgccattcccaatcccat

SEQ ID NO: 6033 - DNA, 20 bp, Artificial Sequence
  Description of Artificial Sequence:  Hypothetical Probe Sequence
cacggagtttagtccctgcg

SEQ ID NO: 6034 - DNA, 20 bp, Artificial Sequence
  Description of Artificial Sequence:  Hypothetical Probe Sequence
cacgtgcggatggtctgcaa

SEQ ID NO: 6035 - DNA, 20 bp, Artificial Sequence
  Description of Artificial Sequence:  Hypothetical Probe Sequence
cacgcacgcacgttagagcc

SEQ ID NO: 6036 - DNA, 20 bp, Artificial Sequence
  Description of Artificial Sequence:  Hypothetical Probe Sequence
cgaacagcaatcacggacgg

SEQ ID NO: 6037 - DNA, 20 bp, Artificial Sequence
  Description of Artificial Sequence:  Hypothetical Probe Sequence
cagctcgtagtgctgttgcg

SEQ ID NO: 6038 - DNA, 20 bp, Artificial Sequence
  Description of Artificial Sequence:  Hypothetical Probe Sequence
cagccttgccatgcaagcaa

SEQ ID NO: 6039 - DNA, 20 bp, Artificial Sequence
  Description of Artificial Sequence:  Hypothetical Probe Sequence
cgaacagcgagtttgatccc

SEQ ID NO: 6040 - DNA, 20 bp, Artificial Sequence
  Description of Artificial Sequence:  Hypothetical Probe Sequence
cagcagtgttagcagcagcc

SEQ ID NO: 6041 - DNA, 20 bp, Artificial Sequence
  Description of Artificial Sequence:  Hypothetical Probe Sequence
cagcgatgaaaggtgcgatg

SEQ ID NO: 6042 - DNA, 20 bp, Artificial Sequence
  Description of Artificial Sequence:  Hypothetical Probe Sequence
cgaacagccagcgaccggta

SEQ ID NO: 6043 - DNA, 20 bp, Artificial Sequence
  Description of Artificial Sequence:  Hypothetical Probe Sequence
gaccctgtctcagtgcgtgc

SEQ ID NO: 6044 - DNA, 20 bp, Artificial Sequence
  Description of Artificial Sequence:  Hypothetical Probe Sequence
gaccgtctaggatcccctca

SEQ ID NO: 6045 - DNA, 20 bp, Artificial Sequence
  Description of Artificial Sequence:  Hypothetical Probe Sequence
cgaagacctccccctaatcg

SEQ ID NO: 6046 - DNA, 20 bp, Artificial Sequence
  Description of Artificial Sequence:  Hypothetical Probe Sequence
gacctgcgttagctcaagcc

SEQ ID NO: 6047 - DNA, 20 bp, Artificial Sequence
  Description of Artificial Sequence:  Hypothetical Probe Sequence
gtgcggtaaatctcgttgcg

SEQ ID NO: 6048 - DNA, 20 bp, Artificial Sequence
  Description of Artificial Sequence:  Hypothetical Probe Sequence
cgaagtgcaggaagcctcgt

SEQ ID NO: 6049 - DNA, 20 bp, Artificial Sequence
  Description of Artificial Sequence:  Hypothetical Probe Sequence
gtgctccccctagatgcgaa

SEQ ID NO: 6050 - DNA, 20 bp, Artificial Sequence
  Description of Artificial Sequence:  Hypothetical Probe Sequence
cgaagtgcagccgatgggac

SEQ ID NO: 6051 - DNA, 20 bp, Artificial Sequence
  Description of Artificial Sequence:  Hypothetical Probe Sequence
ggacgcttgacctgatgcaa

SEQ ID NO: 6052 - DNA, 20 bp, Artificial Sequence
  Description of Artificial Sequence:  Hypothetical Probe Sequence
ggacaccttctgtcccacgg

SEQ ID NO: 6053 - DNA, 20 bp, Artificial Sequence
  Description of Artificial Sequence:  Hypothetical Probe Sequence
ggacgatggagtacgggctt

SEQ ID NO: 6054 - DNA, 20 bp, Artificial Sequence
  Description of Artificial Sequence:  Hypothetical Probe Sequence
acggtgattccctgtcgacc

SEQ ID NO: 6055 - DNA, 20 bp, Artificial Sequence
  Description of Artificial Sequence:  Hypothetical Probe Sequence
acggtctgcagcaaagtccc

SEQ ID NO: 6056 - DNA, 20 bp, Artificial Sequence
  Description of Artificial Sequence:  Hypothetical Probe Sequence
cgaaacgggagtggacggta

SEQ ID NO: 6057 - DNA, 20 bp, Artificial Sequence
  Description of Artificial Sequence:  Hypothetical Probe Sequence
cgaaacggacctaggacgtt

SEQ ID NO: 6058 - DNA, 20 bp, Artificial Sequence
  Description of Artificial Sequence:  Hypothetical Probe Sequence
acggaggacttgatcgagcc

SEQ ID NO: 6059 - DNA, 20 bp, Artificial Sequence
  Description of Artificial Sequence:  Hypothetical Probe Sequence
cgaaacggcctatcgtgcaa

SEQ ID NO: 6060 - DNA, 20 bp, Artificial Sequence
  Description of Artificial Sequence:  Hypothetical Probe Sequence
cgaaacggtgcgctgttcgt

SEQ ID NO: 6061 - DNA, 20 bp, Artificial Sequence
  Description of Artificial Sequence:  Hypothetical Probe Sequence
cgaaacggacggcacgatcg

SEQ ID NO: 6062 - DNA, 20 bp, Artificial Sequence
  Description of Artificial Sequence:  Hypothetical Probe Sequence
agcctgatcctatcccggac

SEQ ID NO: 6063 - DNA, 20 bp, Artificial Sequence
  Description of Artificial Sequence:  Hypothetical Probe Sequence
cgaaagcctctggcaacgaa

SEQ ID NO: 6064 - DNA, 20 bp, Artificial Sequence
  Description of Artificial Sequence:  Hypothetical Probe Sequence
agccctcaaatcgatgggac

SEQ ID NO: 6065 - DNA, 20 bp, Artificial Sequence
  Description of Artificial Sequence:  Hypothetical Probe Sequence
cgaaagccacctttagcagc

SEQ ID NO: 6066 - DNA, 20 bp, Artificial Sequence
  Description of Artificial Sequence:  Hypothetical Probe Sequence
agccatcggtctgatgcgaa

SEQ ID NO: 6067 - DNA, 20 bp, Artificial Sequence
  Description of Artificial Sequence:  Hypothetical Probe Sequence
agccaggaagtggatggctt

SEQ ID NO: 6068 - DNA, 20 bp, Artificial Sequence
  Description of Artificial Sequence:  Hypothetical Probe Sequence
cgaaagccgatgcgaatgat

SEQ ID NO: 6069 - DNA, 20 bp, Artificial Sequence
  Description of Artificial Sequence:  Hypothetical Probe Sequence
cgaaagccgtgcgatgggac

SEQ ID NO: 6070 - DNA, 20 bp, Artificial Sequence
  Description of Artificial Sequence:  Hypothetical Probe Sequence
tgatatcgcttgacgggacc

SEQ ID NO: 6071 - DNA, 20 bp, Artificial Sequence
  Description of Artificial Sequence:  Hypothetical Probe Sequence
tgatcagctcccgacctgcg

SEQ ID NO: 6072 - DNA, 20 bp, Artificial Sequence
  Description of Artificial Sequence:  Hypothetical Probe Sequence
tgatgaccccattcccgacc

SEQ ID NO: 6073 - DNA, 20 bp, Artificial Sequence
  Description of Artificial Sequence:  Hypothetical Probe Sequence
aatccagcggtatccccacg

SEQ ID NO: 6074 - DNA, 20 bp, Artificial Sequence
  Description of Artificial Sequence:  Hypothetical Probe Sequence
aaagcgtttgcgccatgtgc

SEQ ID NO: 6075 - DNA, 20 bp, Artificial Sequence
  Description of Artificial Sequence:  Hypothetical Probe Sequence
aaagcagcgaccgcttcgtt

SEQ ID NO: 6076 - DNA, 20 bp, Artificial Sequence
  Description of Artificial Sequence:  Hypothetical Probe Sequence
tctgcttgacggcttggcaa

SEQ ID NO: 6077 - DNA, 20 bp, Artificial Sequence
  Description of Artificial Sequence:  Hypothetical Probe Sequence
tctgctcaggacgctttcgt

SEQ ID NO: 6078 - DNA, 20 bp, Artificial Sequence
  Description of Artificial Sequence:  Hypothetical Probe Sequence
tctgctgttccccagcctca

SEQ ID NO: 6079 - DNA, 20 bp, Artificial Sequence
  Description of Artificial Sequence:  Hypothetical Probe Sequence
tctgcctaaggatgcgatcg

SEQ ID NO: 6080 - DNA, 20 bp, Artificial Sequence
  Description of Artificial Sequence:  Hypothetical Probe Sequence
tctgggacgcaaatcgccta

SEQ ID NO: 6081 - DNA, 20 bp, Artificial Sequence
  Description of Artificial Sequence:  Hypothetical Probe Sequence
tgtcgagtgtcttccctgcg

SEQ ID NO: 6082 - DNA, 20 bp, Artificial Sequence
  Description of Artificial Sequence:  Hypothetical Probe Sequence
tgtcgaccgcttcgaagcaa

SEQ ID NO: 6083 - DNA, 20 bp, Artificial Sequence
  Description of Artificial Sequence:  Hypothetical Probe Sequence
tcgttgtcgtgctgcgctca

SEQ ID NO: 6084 - DNA, 20 bp, Artificial Sequence
  Description of Artificial Sequence:  Hypothetical Probe Sequence
tcgtcgttgtgcaggagcaa

SEQ ID NO: 6085 - DNA, 20 bp, Artificial Sequence
  Description of Artificial Sequence:  Hypothetical Probe Sequence
tcgtgatgcctatccctgcg

SEQ ID NO: 6086 - DNA, 20 bp, Artificial Sequence
  Description of Artificial Sequence:  Hypothetical Probe Sequence
tcgtagccttagtcccgcaa

SEQ ID NO: 6087 - DNA, 20 bp, Artificial Sequence
  Description of Artificial Sequence:  Hypothetical Probe Sequence
cttgccatcttggatgtgcg

SEQ ID NO: 6088 - DNA, 20 bp, Artificial Sequence
  Description of Artificial Sequence:  Hypothetical Probe Sequence
cttggcaaagtgcgttacgg

SEQ ID NO: 6089 - DNA, 20 bp, Artificial Sequence
  Description of Artificial Sequence:  Hypothetical Probe Sequence
cttgatcgacggtcccacgg

SEQ ID NO: 6090 - DNA, 20 bp, Artificial Sequence
  Description of Artificial Sequence:  Hypothetical Probe Sequence
cgttcagccgttgaccagga

SEQ ID NO: 6091 - DNA, 20 bp, Artificial Sequence
  Description of Artificial Sequence:  Hypothetical Probe Sequence
gcttcgttgtgcagcccgaa

SEQ ID NO: 6092 - DNA, 20 bp, Artificial Sequence
  Description of Artificial Sequence:  Hypothetical Probe Sequence
ctcagtgcgctttgcgcgtt

SEQ ID NO: 6093 - DNA, 20 bp, Artificial Sequence
  Description of Artificial Sequence:  Hypothetical Probe Sequence
ctgtacgggaccgacctgcg

SEQ ID NO: 6094 - DNA, 20 bp, Artificial Sequence
  Description of Artificial Sequence:  Hypothetical Probe Sequence
ccattcccgatgtccctccc

SEQ ID NO: 6095 - DNA, 20 bp, Artificial Sequence
  Description of Artificial Sequence:  Hypothetical Probe Sequence
cgaacttggcaatcccgtgc

SEQ ID NO: 6096 - DNA, 20 bp, Artificial Sequence
  Description of Artificial Sequence:  Hypothetical Probe Sequence
cgaactgtgcaaagcccagc

SEQ ID NO: 6097 - DNA, 20 bp, Artificial Sequence
  Description of Artificial Sequence:  Hypothetical Probe Sequence
cgaaagtggcaaacgggatg

SEQ ID NO: 6098 - DNA, 20 bp, Artificial Sequence
  Description of Artificial Sequence:  Hypothetical Probe Sequence
gcttcgaaaggatgcgctgt

SEQ ID NO: 6099 - DNA, 20 bp, Artificial Sequence
  Description of Artificial Sequence:  Hypothetical Probe Sequence
gcttcttgatacagccgcaa

SEQ ID NO: 6100 - DNA, 20 bp, Artificial Sequence
  Description of Artificial Sequence:  Hypothetical Probe Sequence
gcttgctttccctctgagcc

SEQ ID NO: 6101 - DNA, 20 bp, Artificial Sequence
  Description of Artificial Sequence:  Hypothetical Probe Sequence
gcttggtagcaagtgcggac

SEQ ID NO: 6102 - DNA, 20 bp, Artificial Sequence
  Description of Artificial Sequence:  Hypothetical Probe Sequence
gagtcgtttcccgaccagcc

SEQ ID NO: 6103 - DNA, 20 bp, Artificial Sequence
  Description of Artificial Sequence:  Hypothetical Probe Sequence
gagtgtgctgcgcttgcacg

SEQ ID NO: 6104 - DNA, 20 bp, Artificial Sequence
  Description of Artificial Sequence:  Hypothetical Probe Sequence
gcttgcaaaaagcacgcgaa

SEQ ID NO: 6105 - DNA, 20 bp, Artificial Sequence
  Description of Artificial Sequence:  Hypothetical Probe Sequence
gcaatcgtctcagcaatgcg

SEQ ID NO: 6106 - DNA, 20 bp, Artificial Sequence
  Description of Artificial Sequence:  Hypothetical Probe Sequence
gcaacgaagtctcagcgcaa

SEQ ID NO: 6107 - DNA, 20 bp, Artificial Sequence
  Description of Artificial Sequence:  Hypothetical Probe Sequence
gcttgcaaacctcacgccat

SEQ ID NO: 6108 - DNA, 20 bp, Artificial Sequence
  Description of Artificial Sequence:  Hypothetical Probe Sequence
gcttgcaagatgcagctccc

SEQ ID NO: 6109 - DNA, 20 bp, Artificial Sequence
  Description of Artificial Sequence:  Hypothetical Probe Sequence
acctcagctcccagccagcc

SEQ ID NO: 6110 - DNA, 20 bp, Artificial Sequence
  Description of Artificial Sequence:  Hypothetical Probe Sequence
atcgcttgtctggtgctccc

SEQ ID NO: 6111 - DNA, 20 bp, Artificial Sequence
  Description of Artificial Sequence:  Hypothetical Probe Sequence
atcgcctattgaacggcgtt

SEQ ID NO: 6112 - DNA, 20 bp, Artificial Sequence
  Description of Artificial Sequence:  Hypothetical Probe Sequence
atcggaccgacccttgcgtt

SEQ ID NO: 6113 - DNA, 20 bp, Artificial Sequence
  Description of Artificial Sequence:  Hypothetical Probe Sequence
cctacgtttgcgcttgcgaa

SEQ ID NO: 6114 - DNA, 20 bp, Artificial Sequence
  Description of Artificial Sequence:  Hypothetical Probe Sequence
gatggcaaaggacacgacgg

SEQ ID NO: 6115 - DNA, 20 bp, Artificial Sequence
  Description of Artificial Sequence:  Hypothetical Probe Sequence
gcttgatgcacgaaagcgtt

SEQ ID NO: 6116 - DNA, 20 bp, Artificial Sequence
  Description of Artificial Sequence:  Hypothetical Probe Sequence
gatggtgcataccgtttccc

SEQ ID NO: 6117 - DNA, 20 bp, Artificial Sequence
  Description of Artificial Sequence:  Hypothetical Probe Sequence
tcccatcggtctgacctccc

SEQ ID NO: 6118 - DNA, 20 bp, Artificial Sequence
  Description of Artificial Sequence:  Hypothetical Probe Sequence
tcccgaccggtatgtcgcaa

SEQ ID NO: 6119 - DNA, 20 bp, Artificial Sequence
  Description of Artificial Sequence:  Hypothetical Probe Sequence
tgcgtacaacgggcaatccc

SEQ ID NO: 6120 - DNA, 20 bp, Artificial Sequence
  Description of Artificial Sequence:  Hypothetical Probe Sequence
tgcgcgaagagtatcggcaa

SEQ ID NO: 6121 - DNA, 20 bp, Artificial Sequence
  Description of Artificial Sequence:  Hypothetical Probe Sequence
tgcgggtaaatcgagtacgg

SEQ ID NO: 6122 - DNA, 20 bp, Artificial Sequence
  Description of Artificial Sequence:  Hypothetical Probe Sequence
tgcgagtgggaccttgagcc

SEQ ID NO: 6123 - DNA, 20 bp, Artificial Sequence
  Description of Artificial Sequence:  Hypothetical Probe Sequence
gctttgcgatcggcaatccc

SEQ ID NO: 6124 - DNA, 20 bp, Artificial Sequence
  Description of Artificial Sequence:  Hypothetical Probe Sequence
tgcgacggtgtcaaaggcaa

SEQ ID NO: 6125 - DNA, 20 bp, Artificial Sequence
  Description of Artificial Sequence:  Hypothetical Probe Sequence
cacgtgtccacgtccccacg

SEQ ID NO: 6126 - DNA, 20 bp, Artificial Sequence
  Description of Artificial Sequence:  Hypothetical Probe Sequence
cacgcttgaaagcagcgagt

SEQ ID NO: 6127 - DNA, 20 bp, Artificial Sequence
  Description of Artificial Sequence:  Hypothetical Probe Sequence
cacgctgttacaatcggcaa

SEQ ID NO: 6128 - DNA, 20 bp, Artificial Sequence
  Description of Artificial Sequence:  Hypothetical Probe Sequence
cacgtcccgatgcttggacc

SEQ ID NO: 6129 - DNA, 20 bp, Artificial Sequence
  Description of Artificial Sequence:  Hypothetical Probe Sequence
cacggacccacggagtcgaa

SEQ ID NO: 6130 - DNA, 20 bp, Artificial Sequence
  Description of Artificial Sequence:  Hypothetical Probe Sequence
cagcaatctccccgaaagcc

SEQ ID NO: 6131 - DNA, 20 bp, Artificial Sequence
  Description of Artificial Sequence:  Hypothetical Probe Sequence
cagctctgagcctccccacg

SEQ ID NO: 6132 - DNA, 20 bp, Artificial Sequence
  Description of Artificial Sequence:  Hypothetical Probe Sequence
cagctcgtaatctccccagc

SEQ ID NO: 6133 - DNA, 20 bp, Artificial Sequence
  Description of Artificial Sequence:  Hypothetical Probe Sequence
cagcgcaaaaagaatcgacc

SEQ ID NO: 6134 - DNA, 20 bp, Artificial Sequence
  Description of Artificial Sequence:  Hypothetical Probe Sequence
cagcacctggtaagccacgg

SEQ ID NO: 6135 - DNA, 20 bp, Artificial Sequence
  Description of Artificial Sequence:  Hypothetical Probe Sequence
cagccacggcaactcagcaa

SEQ ID NO: 6136 - DNA, 20 bp, Artificial Sequence
  Description of Artificial Sequence:  Hypothetical Probe Sequence
gaccaatccacgtgcgagcc

SEQ ID NO: 6137 - DNA, 20 bp, Artificial Sequence
  Description of Artificial Sequence:  Hypothetical Probe Sequence
gcttgaccccatgcttgctt

SEQ ID NO: 6138 - DNA, 20 bp, Artificial Sequence
  Description of Artificial Sequence:  Hypothetical Probe Sequence
gacccctaagcccacgctca

SEQ ID NO: 6139 - DNA, 20 bp, Artificial Sequence
  Description of Artificial Sequence:  Hypothetical Probe Sequence
gcttgacccagcgaccgtgc

SEQ ID NO: 6140 - DNA, 20 bp, Artificial Sequence
  Description of Artificial Sequence:  Hypothetical Probe Sequence
gcttgtgcatcggtgccttg

SEQ ID NO: 6141 - DNA, 20 bp, Artificial Sequence
  Description of Artificial Sequence:  Hypothetical Probe Sequence
gcttgtgctcccaatctgcg

SEQ ID NO: 6142 - DNA, 20 bp, Artificial Sequence
  Description of Artificial Sequence:  Hypothetical Probe Sequence
ggaccgtttctggtgcccat

SEQ ID NO: 6143 - DNA, 20 bp, Artificial Sequence
  Description of Artificial Sequence:  Hypothetical Probe Sequence
gcttggaccgaatctggcaa

SEQ ID NO: 6144 - DNA, 20 bp, Artificial Sequence
  Description of Artificial Sequence:  Hypothetical Probe Sequence
ggactccccttgtgtcgcaa

SEQ ID NO: 6145 - DNA, 20 bp, Artificial Sequence
  Description of Artificial Sequence:  Hypothetical Probe Sequence
ggaccacgtacatcccagcc

SEQ ID NO: 6146 - DNA, 20 bp, Artificial Sequence
  Description of Artificial Sequence:  Hypothetical Probe Sequence
acggtctgacggtgcgtcgt

SEQ ID NO: 6147 - DNA, 20 bp, Artificial Sequence
  Description of Artificial Sequence:  Hypothetical Probe Sequence
agccctgtaatcacgggcaa

SEQ ID NO: 6148 - DNA, 20 bp, Artificial Sequence
  Description of Artificial Sequence:  Hypothetical Probe Sequence
agccatcgctcaaaagcgaa

SEQ ID NO: 6149 - DNA, 20 bp, Artificial Sequence
  Description of Artificial Sequence:  Hypothetical Probe Sequence
tctggtgcaggacgaatgcg

SEQ ID NO: 6150 - DNA, 20 bp, Artificial Sequence
  Description of Artificial Sequence:  Hypothetical Probe Sequence
tgtcgctttgcgcagctccc

SEQ ID NO: 6151 - DNA, 20 bp, Artificial Sequence
  Description of Artificial Sequence:  Hypothetical Probe Sequence
cgaacagcggtaagccgcaa

SEQ ID NO: 6152 - DNA, 20 bp, Artificial Sequence
  Description of Artificial Sequence:  Hypothetical Probe Sequence
cgaaagcctacaagcccgaa

SEQ ID NO: 6153 - DNA, 20 bp, Artificial Sequence
  Description of Artificial Sequence:  Hypothetical Probe Sequence
gcaacagcgacccagccagc

SEQ ID NO: 6154 - DNA, 20 bp, Artificial Sequence
  Description of Artificial Sequence:  Hypothetical Probe Sequence
gcaaggactgcgtctgtgcg

SEQ ID NO: 6155 - DNA, 20 bp, Artificial Sequence
  Description of Artificial Sequence:  Hypothetical Probe Sequence
acctcacgtgcgctgttgcg

SEQ ID NO: 6156 - DNA, 20 bp, Artificial Sequence
  Description of Artificial Sequence:  Hypothetical Probe Sequence
atcggcaacgttcttgacgg

SEQ ID NO: 6157 - DNA, 20 bp, Artificial Sequence
  Description of Artificial Sequence:  Hypothetical Probe Sequence
gatggcttcgtttccccagc

SEQ ID NO: 6158 - DNA, 20 bp, Artificial Sequence
  Description of Artificial Sequence:  Hypothetical Probe Sequence
tgcggcaactgtatcggtgc

SEQ ID NO: 6159 - DNA, 20 bp, Artificial Sequence
  Description of Artificial Sequence:  Hypothetical Probe Sequence
tgcgagtggtgcggtagtgc

SEQ ID NO: 6160 - DNA, 20 bp, Artificial Sequence
  Description of Artificial Sequence:  Hypothetical Probe Sequence
cacggcaacgttccattcgt

SEQ ID NO: 6161 - DNA, 20 bp, Artificial Sequence
  Description of Artificial Sequence:  Hypothetical Probe Sequence
cacgatcggaccaggatgcg

SEQ ID NO: 6162 - DNA, 20 bp, Artificial Sequence
  Description of Artificial Sequence:  Hypothetical Probe Sequence
cacgagccgagtcagcgctt

SEQ ID NO: 6163 - DNA, 20 bp, Artificial Sequence
  Description of Artificial Sequence:  Hypothetical Probe Sequence
cagcgcttaggaggacgtgc

SEQ ID NO: 6164 - DNA, 20 bp, Artificial Sequence
  Description of Artificial Sequence:  Hypothetical Probe Sequence
cagcgaccctgttccctccc

SEQ ID NO: 6165 - DNA, 20 bp, Artificial Sequence
  Description of Artificial Sequence:  Hypothetical Probe Sequence
gaccggtacagcatcgcgaa

SEQ ID NO: 6166 - DNA, 20 bp, Artificial Sequence
  Description of Artificial Sequence:  Hypothetical Probe Sequence
gaccatcgcagcgtgcatcg

SEQ ID NO: 6167 - DNA, 20 bp, Artificial Sequence
  Description of Artificial Sequence:  Hypothetical Probe Sequence
gaccgtgcccatccattgcg

SEQ ID NO: 6168 - DNA, 20 bp, Artificial Sequence
  Description of Artificial Sequence:  Hypothetical Probe Sequence
gaccacggttagtgcgagcc

SEQ ID NO: 6169 - DNA, 20 bp, Artificial Sequence
  Description of Artificial Sequence:  Hypothetical Probe Sequence
acggtcgtttagacggtgcg

SEQ ID NO: 6170 - DNA, 20 bp, Artificial Sequence
  Description of Artificial Sequence:  Hypothetical Probe Sequence
acggctgtgtgcgatggatg

SEQ ID NO: 6171 - DNA, 20 bp, Artificial Sequence
  Description of Artificial Sequence:  Hypothetical Probe Sequence
agccgagtaccttgcgctgt

SEQ ID NO: 6172 - DNA, 20 bp, Artificial Sequence
  Description of Artificial Sequence:  Hypothetical Probe Sequence
ttgatgcgcgtttgcgaaag

SEQ ID NO: 6173 - DNA, 20 bp, Artificial Sequence
  Description of Artificial Sequence:  Hypothetical Probe Sequence
tctgcagctgcgcttgccat

SEQ ID NO: 6174 - DNA, 20 bp, Artificial Sequence
  Description of Artificial Sequence:  Hypothetical Probe Sequence
cttgcagcacggtccctgcg

SEQ ID NO: 6175 - DNA, 20 bp, Artificial Sequence
  Description of Artificial Sequence:  Hypothetical Probe Sequence
cgttcgaacagcagccgctt

SEQ ID NO: 6176 - DNA, 20 bp, Artificial Sequence
  Description of Artificial Sequence:  Hypothetical Probe Sequence
cgttgtgccacgtcgttgcg

SEQ ID NO: 6177 - DNA, 20 bp, Artificial Sequence
  Description of Artificial Sequence:  Hypothetical Probe Sequence
ccattcccacggctgtagcc

SEQ ID NO: 6178 - DNA, 20 bp, Artificial Sequence
  Description of Artificial Sequence:  Hypothetical Probe Sequence
cgaacgaacagcgcaacacg

SEQ ID NO: 6179 - DNA, 20 bp, Artificial Sequence
  Description of Artificial Sequence:  Hypothetical Probe Sequence
cgaaatcgcgaaacgggacc

SEQ ID NO: 6180 - DNA, 20 bp, Artificial Sequence
  Description of Artificial Sequence:  Hypothetical Probe Sequence
gcaaatcgaatctccccgtt

SEQ ID NO: 6181 - DNA, 20 bp, Artificial Sequence
  Description of Artificial Sequence:  Hypothetical Probe Sequence
gatgcagcatcgtgcggcaa

SEQ ID NO: 6182 - DNA, 20 bp, Artificial Sequence
  Description of Artificial Sequence:  Hypothetical Probe Sequence
tccccttgacggcgttgcaa

SEQ ID NO: 6183 - DNA, 20 bp, Artificial Sequence
  Description of Artificial Sequence:  Hypothetical Probe Sequence
tcccccattctgacggggta

SEQ ID NO: 6184 - DNA, 20 bp, Artificial Sequence
  Description of Artificial Sequence:  Hypothetical Probe Sequence
tcccacggagtgccatgtgc

SEQ ID NO: 6185 - DNA, 20 bp, Artificial Sequence
  Description of Artificial Sequence:  Hypothetical Probe Sequence
tgcgagtgatcgagccagcc

SEQ ID NO: 6186 - DNA, 20 bp, Artificial Sequence
  Description of Artificial Sequence:  Hypothetical Probe Sequence
tgcggacctccctacaacgg

SEQ ID NO: 6187 - DNA, 20 bp, Artificial Sequence
  Description of Artificial Sequence:  Hypothetical Probe Sequence
cacgctcaacggcttgccat

SEQ ID NO: 6188 - DNA, 20 bp, Artificial Sequence
  Description of Artificial Sequence:  Hypothetical Probe Sequence
cacggctttgtcagccgtgc

SEQ ID NO: 6189 - DNA, 20 bp, Artificial Sequence
  Description of Artificial Sequence:  Hypothetical Probe Sequence
cacgcctagacctgcggcaa

SEQ ID NO: 6190 - DNA, 20 bp, Artificial Sequence
  Description of Artificial Sequence:  Hypothetical Probe Sequence
cacgtcccctgtgctttgcg

SEQ ID NO: 6191 - DNA, 20 bp, Artificial Sequence
  Description of Artificial Sequence:  Hypothetical Probe Sequence
cacgacggcgttcgttgtgc

SEQ ID NO: 6192 - DNA, 20 bp, Artificial Sequence
  Description of Artificial Sequence:  Hypothetical Probe Sequence
cagccagctcgttcgtcgaa

SEQ ID NO: 6193 - DNA, 20 bp, Artificial Sequence
  Description of Artificial Sequence:  Hypothetical Probe Sequence
cagcggacggacggacccta

SEQ ID NO: 6194 - DNA, 20 bp, Artificial Sequence
  Description of Artificial Sequence:  Hypothetical Probe Sequence
gtgcgcttcacgttgatgcg

SEQ ID NO: 6195 - DNA, 20 bp, Artificial Sequence
  Description of Artificial Sequence:  Hypothetical Probe Sequence
gtgcgcaaggaccgttccat

SEQ ID NO: 6196 - DNA, 20 bp, Artificial Sequence
  Description of Artificial Sequence:  Hypothetical Probe Sequence
gtgcagccgctttcccagga

SEQ ID NO: 6197 - DNA, 20 bp, Artificial Sequence
  Description of Artificial Sequence:  Hypothetical Probe Sequence
gtctggacgcttacggcgaa

SEQ ID NO: 6198 - DNA, 20 bp, Artificial Sequence
  Description of Artificial Sequence:  Hypothetical Probe Sequence
ggactcccgcaacacgtgcg

SEQ ID NO: 6199 - DNA, 20 bp, Artificial Sequence
  Description of Artificial Sequence:  Hypothetical Probe Sequence
ggacagccatcgatcgtgcg

SEQ ID NO: 6200 - DNA, 20 bp, Artificial Sequence
  Description of Artificial Sequence:  Hypothetical Probe Sequence
agccggtacagctcccatcg

SEQ ID NO: 6201 - DNA, 20 bp, Artificial Sequence
  Description of Artificial Sequence:  Hypothetical Probe Sequence
tctgtgcgcacgcacggcaa

SEQ ID NO: 6202 - DNA, 20 bp, Artificial Sequence
  Description of Artificial Sequence:  Hypothetical Probe Sequence
tctgcacgacggcacgtccc

SEQ ID NO: 6203 - DNA, 20 bp, Artificial Sequence
  Description of Artificial Sequence:  Hypothetical Probe Sequence
cttgcacgccatagcccacg

SEQ ID NO: 6204 - DNA, 20 bp, Artificial Sequence
  Description of Artificial Sequence:  Hypothetical Probe Sequence
cgttcgttagccatcgtgcg

SEQ ID NO: 6205 - DNA, 20 bp, Artificial Sequence
  Description of Artificial Sequence:  Hypothetical Probe Sequence
ctgtcacgcagcagccagga

SEQ ID NO: 6206 - DNA, 20 bp, Artificial Sequence
  Description of Artificial Sequence:  Hypothetical Probe Sequence
cgaaagcctgcgtcgtccat

SEQ ID NO: 6207 - DNA, 20 bp, Artificial Sequence
  Description of Artificial Sequence:  Hypothetical Probe Sequence
gcttgcaacacgcacgacct

SEQ ID NO: 6208 - DNA, 20 bp, Artificial Sequence
  Description of Artificial Sequence:  Hypothetical Probe Sequence
gcttcacggtgcgtgcagcc

SEQ ID NO: 6209 - DNA, 20 bp, Artificial Sequence
  Description of Artificial Sequence:  Hypothetical Probe Sequence
atcgtgcgatcggaccctca

SEQ ID NO: 6210 - DNA, 20 bp, Artificial Sequence
  Description of Artificial Sequence:  Hypothetical Probe Sequence
cctacagctcccgctttgcg

SEQ ID NO: 6211 - DNA, 20 bp, Artificial Sequence
  Description of Artificial Sequence:  Hypothetical Probe Sequence
tcccgtgccctatcgtgtgc

SEQ ID NO: 6212 - DNA, 20 bp, Artificial Sequence
  Description of Artificial Sequence:  Hypothetical Probe Sequence
tgcgaaagcacgggacgtgc

SEQ ID NO: 6213 - DNA, 20 bp, Artificial Sequence
  Description of Artificial Sequence:  Hypothetical Probe Sequence
tgcgccattacatcccggta

SEQ ID NO: 6214 - DNA, 20 bp, Artificial Sequence
  Description of Artificial Sequence:  Hypothetical Probe Sequence
tgcgggtagcaatctgcacg

SEQ ID NO: 6215 - DNA, 20 bp, Artificial Sequence
  Description of Artificial Sequence:  Hypothetical Probe Sequence
tgcgacctagcctccctgcg

SEQ ID NO: 6216 - DNA, 20 bp, Artificial Sequence
  Description of Artificial Sequence:  Hypothetical Probe Sequence
cagcgatggtgcggacacgg

SEQ ID NO: 6217 - DNA, 20 bp, Artificial Sequence
  Description of Artificial Sequence:  Hypothetical Probe Sequence
cagctccctctggacccgtt

SEQ ID NO: 6218 - DNA, 20 bp, Artificial Sequence
  Description of Artificial Sequence:  Hypothetical Probe Sequence
cagcggacagccgagtcacg

SEQ ID NO: 6219 - DNA, 20 bp, Artificial Sequence
  Description of Artificial Sequence:  Hypothetical Probe Sequence
gagtgacccgtttccccgaa

SEQ ID NO: 6220 - DNA, 20 bp, Artificial Sequence
  Description of Artificial Sequence:  Hypothetical Probe Sequence
gaccgtgcgaccagcccttg

SEQ ID NO: 6221 - DNA, 20 bp, Artificial Sequence
  Description of Artificial Sequence:  Hypothetical Probe Sequence
gtgcttgaggactcccgtgc

SEQ ID NO: 6222 - DNA, 20 bp, Artificial Sequence
  Description of Artificial Sequence:  Hypothetical Probe Sequence
ggacccattgtcggacggac

SEQ ID NO: 6223 - DNA, 20 bp, Artificial Sequence
  Description of Artificial Sequence:  Hypothetical Probe Sequence
ggacggactgtcatcgcacg

SEQ ID NO: 6224 - DNA, 20 bp, Artificial Sequence
  Description of Artificial Sequence:  Hypothetical Probe Sequence
acggccatttagtgcggctt

SEQ ID NO: 6225 - DNA, 20 bp, Artificial Sequence
  Description of Artificial Sequence:  Hypothetical Probe Sequence
agccatcggaccagcccacg

SEQ ID NO: 6226 - DNA, 20 bp, Artificial Sequence
  Description of Artificial Sequence:  Hypothetical Probe Sequence
gcaattgagtgcggaccgaa

SEQ ID NO: 6227 - DNA, 20 bp, Artificial Sequence
  Description of Artificial Sequence:  Hypothetical Probe Sequence
tgattcgttccccttgcacg

SEQ ID NO: 6228 - DNA, 20 bp, Artificial Sequence
  Description of Artificial Sequence:  Hypothetical Probe Sequence
tgatcagcgctttcccagcc

SEQ ID NO: 6229 - DNA, 20 bp, Artificial Sequence
  Description of Artificial Sequence:  Hypothetical Probe Sequence
gcaaaatcatcggtgccgaa

SEQ ID NO: 6230 - DNA, 20 bp, Artificial Sequence
  Description of Artificial Sequence:  Hypothetical Probe Sequence
aatctcccatcgctcatccc

SEQ ID NO: 6231 - DNA, 20 bp, Artificial Sequence
  Description of Artificial Sequence:  Hypothetical Probe Sequence
gcaaaatccacgcagcctgt

SEQ ID NO: 6232 - DNA, 20 bp, Artificial Sequence
  Description of Artificial Sequence:  Hypothetical Probe Sequence
aaagacctaggaagccgcaa

SEQ ID NO: 6233 - DNA, 20 bp, Artificial Sequence
  Description of Artificial Sequence:  Hypothetical Probe Sequence
tctgcgttttagggacacgg

SEQ ID NO: 6234 - DNA, 20 bp, Artificial Sequence
  Description of Artificial Sequence:  Hypothetical Probe Sequence
tctggcaacgttatcgcgtt

SEQ ID NO: 6235 - DNA, 20 bp, Artificial Sequence
  Description of Artificial Sequence:  Hypothetical Probe Sequence
tctgtcccgcaactcaagcc

SEQ ID NO: 6236 - DNA, 20 bp, Artificial Sequence
  Description of Artificial Sequence:  Hypothetical Probe Sequence
tctgtgcgctgtggacgtgc

SEQ ID NO: 6237 - DNA, 20 bp, Artificial Sequence
  Description of Artificial Sequence:  Hypothetical Probe Sequence
tctggaccaatcagccccat

SEQ ID NO: 6238 - DNA, 20 bp, Artificial Sequence
  Description of Artificial Sequence:  Hypothetical Probe Sequence
tctgggacagccgtgccagc

SEQ ID NO: 6239 - DNA, 20 bp, Artificial Sequence
  Description of Artificial Sequence:  Hypothetical Probe Sequence
tgtctcgtgacctgcgcgaa

SEQ ID NO: 6240 - DNA, 20 bp, Artificial Sequence
  Description of Artificial Sequence:  Hypothetical Probe Sequence
tgtcgctttcgtgtgcctca

SEQ ID NO: 6241 - DNA, 20 bp, Artificial Sequence
  Description of Artificial Sequence:  Hypothetical Probe Sequence
tgtcggtagacctcccgctt

SEQ ID NO: 6242 - DNA, 20 bp, Artificial Sequence
  Description of Artificial Sequence:  Hypothetical Probe Sequence
tgtcatcgtccctccccacg

SEQ ID NO: 6243 - DNA, 20 bp, Artificial Sequence
  Description of Artificial Sequence:  Hypothetical Probe Sequence
gcaatgtctgcggatgcgaa

SEQ ID NO: 6244 - DNA, 20 bp, Artificial Sequence
  Description of Artificial Sequence:  Hypothetical Probe Sequence
gcaatgtccacgcgaaatcg

SEQ ID NO: 6245 - DNA, 20 bp, Artificial Sequence
  Description of Artificial Sequence:  Hypothetical Probe Sequence
tcgtctgttgcgaatccgaa

SEQ ID NO: 6246 - DNA, 20 bp, Artificial Sequence
  Description of Artificial Sequence:  Hypothetical Probe Sequence
tcgtacctgcttgtgccgaa

SEQ ID NO: 6247 - DNA, 20 bp, Artificial Sequence
  Description of Artificial Sequence:  Hypothetical Probe Sequence
tcgtagcctgattccccagc

SEQ ID NO: 6248 - DNA, 20 bp, Artificial Sequence
  Description of Artificial Sequence:  Hypothetical Probe Sequence
cttggatgagcccacgcgaa

SEQ ID NO: 6249 - DNA, 20 bp, Artificial Sequence
  Description of Artificial Sequence:  Hypothetical Probe Sequence
gcaacttgcagccgaagcaa

SEQ ID NO: 6250 - DNA, 20 bp, Artificial Sequence
  Description of Artificial Sequence:  Hypothetical Probe Sequence
cgttttgatcgtcacgagcc

SEQ ID NO: 6251 - DNA, 20 bp, Artificial Sequence
  Description of Artificial Sequence:  Hypothetical Probe Sequence
cgtttacaacggcagcgcaa

SEQ ID NO: 6252 - DNA, 20 bp, Artificial Sequence
  Description of Artificial Sequence:  Hypothetical Probe Sequence
cgttgatggtgctccctgcg

SEQ ID NO: 6253 - DNA, 20 bp, Artificial Sequence
  Description of Artificial Sequence:  Hypothetical Probe Sequence
cgtttcccacctttgaagcc

SEQ ID NO: 6254 - DNA, 20 bp, Artificial Sequence
  Description of Artificial Sequence:  Hypothetical Probe Sequence
ctcaatcgcgaagtgcccat

SEQ ID NO: 6255 - DNA, 20 bp, Artificial Sequence
  Description of Artificial Sequence:  Hypothetical Probe Sequence
ctcacacgacgggtgcagga

SEQ ID NO: 6256 - DNA, 20 bp, Artificial Sequence
  Description of Artificial Sequence:  Hypothetical Probe Sequence
ctcaacgggcttggacagga

SEQ ID NO: 6257 - DNA, 20 bp, Artificial Sequence
  Description of Artificial Sequence:  Hypothetical Probe Sequence
gcaactgttgcggcaagcaa

SEQ ID NO: 6258 - DNA, 20 bp, Artificial Sequence
  Description of Artificial Sequence:  Hypothetical Probe Sequence
ccatctcaggaccagcgcaa

SEQ ID NO: 6259 - DNA, 20 bp, Artificial Sequence
  Description of Artificial Sequence:  Hypothetical Probe Sequence
gcaaccatcgaatgtcacgg

SEQ ID NO: 6260 - DNA, 20 bp, Artificial Sequence
  Description of Artificial Sequence:  Hypothetical Probe Sequence
ccatgatgacggtcccagga

SEQ ID NO: 6261 - DNA, 20 bp, Artificial Sequence
  Description of Artificial Sequence:  Hypothetical Probe Sequence
gcaaccattgcgtcccttag

SEQ ID NO: 6262 - DNA, 20 bp, Artificial Sequence
  Description of Artificial Sequence:  Hypothetical Probe Sequence
gcaaccatggacgatgcgaa

SEQ ID NO: 6263 - DNA, 20 bp, Artificial Sequence
  Description of Artificial Sequence:  Hypothetical Probe Sequence
cgaagcttgacctgtcgctt

SEQ ID NO: 6264 - DNA, 20 bp, Artificial Sequence
  Description of Artificial Sequence:  Hypothetical Probe Sequence
gcttgctttgtccttggcaa

SEQ ID NO: 6265 - DNA, 20 bp, Artificial Sequence
  Description of Artificial Sequence:  Hypothetical Probe Sequence
gcaagcttcacggcttcagc

SEQ ID NO: 6266 - DNA, 20 bp, Artificial Sequence
  Description of Artificial Sequence:  Hypothetical Probe Sequence
gcttagccgatggtgcctca

SEQ ID NO: 6267 - DNA, 20 bp, Artificial Sequence
  Description of Artificial Sequence:  Hypothetical Probe Sequence
gtctgcttaatcgaccgcaa

SEQ ID NO: 6268 - DNA, 20 bp, Artificial Sequence
  Description of Artificial Sequence:  Hypothetical Probe Sequence
gcaaaatcgcaatcgttccc

SEQ ID NO: 6269 - DNA, 20 bp, Artificial Sequence
  Description of Artificial Sequence:  Hypothetical Probe Sequence
gcaacttgctcatgcgagcc

SEQ ID NO: 6270 - DNA, 20 bp, Artificial Sequence
  Description of Artificial Sequence:  Hypothetical Probe Sequence
gcaagcaactcagacccacg

SEQ ID NO: 6271 - DNA, 20 bp, Artificial Sequence
  Description of Artificial Sequence:  Hypothetical Probe Sequence
gcaagcaagctttcccgatg

SEQ ID NO: 6272 - DNA, 20 bp, Artificial Sequence
  Description of Artificial Sequence:  Hypothetical Probe Sequence
gcaacagcatacgaccgcaa

SEQ ID NO: 6273 - DNA, 20 bp, Artificial Sequence
  Description of Artificial Sequence:  Hypothetical Probe Sequence
gcaaagtgggtaccattgcg

SEQ ID NO: 6274 - DNA, 20 bp, Artificial Sequence
  Description of Artificial Sequence:  Hypothetical Probe Sequence
accttctgagcccttgcacg

SEQ ID NO: 6275 - DNA, 20 bp, Artificial Sequence
  Description of Artificial Sequence:  Hypothetical Probe Sequence
accttgtccagctcccggac

SEQ ID NO: 6276 - DNA, 20 bp, Artificial Sequence
  Description of Artificial Sequence:  Hypothetical Probe Sequence
gcaaacctccattgcgggac

SEQ ID NO: 6277 - DNA, 20 bp, Artificial Sequence
  Description of Artificial Sequence:  Hypothetical Probe Sequence
gcaaacctgcaagaccctca

SEQ ID NO: 6278 - DNA, 20 bp, Artificial Sequence
  Description of Artificial Sequence:  Hypothetical Probe Sequence
gcaaacctgaccgcaaagcc

SEQ ID NO: 6279 - DNA, 20 bp, Artificial Sequence
  Description of Artificial Sequence:  Hypothetical Probe Sequence
acctggacgcaagaccgacc

SEQ ID NO: 6280 - DNA, 20 bp, Artificial Sequence
  Description of Artificial Sequence:  Hypothetical Probe Sequence
gcaaatcgctcacctaagcc

SEQ ID NO: 6281 - DNA, 20 bp, Artificial Sequence
  Description of Artificial Sequence:  Hypothetical Probe Sequence
atcggagttgtccagcagcc

SEQ ID NO: 6282 - DNA, 20 bp, Artificial Sequence
  Description of Artificial Sequence:  Hypothetical Probe Sequence
atcgtccccagctgtcccat

SEQ ID NO: 6283 - DNA, 20 bp, Artificial Sequence
  Description of Artificial Sequence:  Hypothetical Probe Sequence
gcaaatcggaccatacgtgc

SEQ ID NO: 6284 - DNA, 20 bp, Artificial Sequence
  Description of Artificial Sequence:  Hypothetical Probe Sequence
gcaaaggatctgtgcggcaa

SEQ ID NO: 6285 - DNA, 20 bp, Artificial Sequence
  Description of Artificial Sequence:  Hypothetical Probe Sequence
aggacttgggacacggtgcg

SEQ ID NO: 6286 - DNA, 20 bp, Artificial Sequence
  Description of Artificial Sequence:  Hypothetical Probe Sequence
aggactcagtgcagccgcaa

SEQ ID NO: 6287 - DNA, 20 bp, Artificial Sequence
  Description of Artificial Sequence:  Hypothetical Probe Sequence
aggaacctatcggatgcgtt

SEQ ID NO: 6288 - DNA, 20 bp, Artificial Sequence
  Description of Artificial Sequence:  Hypothetical Probe Sequence
gcaaaggaatcgcacgggta

SEQ ID NO: 6289 - DNA, 20 bp, Artificial Sequence
  Description of Artificial Sequence:  Hypothetical Probe Sequence
cctagaccgctttcccacgg

SEQ ID NO: 6290 - DNA, 20 bp, Artificial Sequence
  Description of Artificial Sequence:  Hypothetical Probe Sequence
cctaagccaggatcgttccc

SEQ ID NO: 6291 - DNA, 20 bp, Artificial Sequence
  Description of Artificial Sequence:  Hypothetical Probe Sequence
gatgcgttagtgggacagcc

SEQ ID NO: 6292 - DNA, 20 bp, Artificial Sequence
  Description of Artificial Sequence:  Hypothetical Probe Sequence
gatgcctacacgcgaaagcc

SEQ ID NO: 6293 - DNA, 20 bp, Artificial Sequence
  Description of Artificial Sequence:  Hypothetical Probe Sequence
gatgtgcgttgagacccagc

SEQ ID NO: 6294 - DNA, 20 bp, Artificial Sequence
  Description of Artificial Sequence:  Hypothetical Probe Sequence
gcaatcccaatcacggcgaa

SEQ ID NO: 6295 - DNA, 20 bp, Artificial Sequence
  Description of Artificial Sequence:  Hypothetical Probe Sequence
tccctctgcagcgagtgctt

SEQ ID NO: 6296 - DNA, 20 bp, Artificial Sequence
  Description of Artificial Sequence:  Hypothetical Probe Sequence
tcccacggggacaatcgtgc

SEQ ID NO: 6297 - DNA, 20 bp, Artificial Sequence
  Description of Artificial Sequence:  Hypothetical Probe Sequence
tgcgttaggatgccattgcg

SEQ ID NO: 6298 - DNA, 20 bp, Artificial Sequence
  Description of Artificial Sequence:  Hypothetical Probe Sequence
tgcgaaaggatgcgttcgaa

SEQ ID NO: 6299 - DNA, 20 bp, Artificial Sequence
  Description of Artificial Sequence:  Hypothetical Probe Sequence
gcaatgcgtcgtcgaatcgt

SEQ ID NO: 6300 - DNA, 20 bp, Artificial Sequence
  Description of Artificial Sequence:  Hypothetical Probe Sequence
gcaatgcgcgttgtgcctgt

SEQ ID NO: 6301 - DNA, 20 bp, Artificial Sequence
  Description of Artificial Sequence:  Hypothetical Probe Sequence
tgcgctcaacctcgttgtgc

SEQ ID NO: 6302 - DNA, 20 bp, Artificial Sequence
  Description of Artificial Sequence:  Hypothetical Probe Sequence
tgcgcgaatctggatgatcg

SEQ ID NO: 6303 - DNA, 20 bp, Artificial Sequence
  Description of Artificial Sequence:  Hypothetical Probe Sequence
tgcgcagcgctttctgatcg

SEQ ID NO: 6304 - DNA, 20 bp, Artificial Sequence
  Description of Artificial Sequence:  Hypothetical Probe Sequence
tgcgggacttagaccttccc

SEQ ID NO: 6305 - DNA, 20 bp, Artificial Sequence
  Description of Artificial Sequence:  Hypothetical Probe Sequence
cacgaatcgatgcagcggac

SEQ ID NO: 6306 - DNA, 20 bp, Artificial Sequence
  Description of Artificial Sequence:  Hypothetical Probe Sequence
cacgtctgcctatgcgccat

SEQ ID NO: 6307 - DNA, 20 bp, Artificial Sequence
  Description of Artificial Sequence:  Hypothetical Probe Sequence
cacgcgttctgtggtaacgg

SEQ ID NO: 6308 - DNA, 20 bp, Artificial Sequence
  Description of Artificial Sequence:  Hypothetical Probe Sequence
cacgctcagcaaaaagcgtt

SEQ ID NO: 6309 - DNA, 20 bp, Artificial Sequence
  Description of Artificial Sequence:  Hypothetical Probe Sequence
gcaacacgtcccgtcttccc

SEQ ID NO: 6310 - DNA, 20 bp, Artificial Sequence
  Description of Artificial Sequence:  Hypothetical Probe Sequence
gcaacacgggaccacgatcg

SEQ ID NO: 6311 - DNA, 20 bp, Artificial Sequence
  Description of Artificial Sequence:  Hypothetical Probe Sequence
cagcttgatgcgccatcacg

SEQ ID NO: 6312 - DNA, 20 bp, Artificial Sequence
  Description of Artificial Sequence:  Hypothetical Probe Sequence
cagctcgtaggaatcggctt

SEQ ID NO: 6313 - DNA, 20 bp, Artificial Sequence
  Description of Artificial Sequence:  Hypothetical Probe Sequence
cagcccatagtgatcgcacg

SEQ ID NO: 6314 - DNA, 20 bp, Artificial Sequence
  Description of Artificial Sequence:  Hypothetical Probe Sequence
cagcggtaaaaggcttcagc

SEQ ID NO: 6315 - DNA, 20 bp, Artificial Sequence
  Description of Artificial Sequence:  Hypothetical Probe Sequence
cagcgagtaggagtgccacg

SEQ ID NO: 6316 - DNA, 20 bp, Artificial Sequence
  Description of Artificial Sequence:  Hypothetical Probe Sequence
cagccctaatacagcccgtt

SEQ ID NO: 6317 - DNA, 20 bp, Artificial Sequence
  Description of Artificial Sequence:  Hypothetical Probe Sequence
gcaacagccacgcttgcagc

SEQ ID NO: 6318 - DNA, 20 bp, Artificial Sequence
  Description of Artificial Sequence:  Hypothetical Probe Sequence
gcaagaccccattcgtcgtt

SEQ ID NO: 6319 - DNA, 20 bp, Artificial Sequence
  Description of Artificial Sequence:  Hypothetical Probe Sequence
gaccacctaatcggacacgg

SEQ ID NO: 6320 - DNA, 20 bp, Artificial Sequence
  Description of Artificial Sequence:  Hypothetical Probe Sequence
gcaagaccggacggaccacg

SEQ ID NO: 6321 - DNA, 20 bp, Artificial Sequence
  Description of Artificial Sequence:  Hypothetical Probe Sequence
gtgccttgaatctgcgggac

SEQ ID NO: 6322 - DNA, 20 bp, Artificial Sequence
  Description of Artificial Sequence:  Hypothetical Probe Sequence
gtgcctgtctgttcccacgg

SEQ ID NO: 6323 - DNA, 20 bp, Artificial Sequence
  Description of Artificial Sequence:  Hypothetical Probe Sequence
gcaagtgcggtatcccgagt

SEQ ID NO: 6324 - DNA, 20 bp, Artificial Sequence
  Description of Artificial Sequence:  Hypothetical Probe Sequence
gtgcgcaattagatcgtgcg

SEQ ID NO: 6325 - DNA, 20 bp, Artificial Sequence
  Description of Artificial Sequence:  Hypothetical Probe Sequence
gtgcacctgacctccccacg

SEQ ID NO: 6326 - DNA, 20 bp, Artificial Sequence
  Description of Artificial Sequence:  Hypothetical Probe Sequence
gtgcatcgcctagtgctccc

SEQ ID NO: 6327 - DNA, 20 bp, Artificial Sequence
  Description of Artificial Sequence:  Hypothetical Probe Sequence
gcaagtgccctagtgcgtgc

SEQ ID NO: 6328 - DNA, 20 bp, Artificial Sequence
  Description of Artificial Sequence:  Hypothetical Probe Sequence
gtgctcccgtctgtgcccat

SEQ ID NO: 6329 - DNA, 20 bp, Artificial Sequence
  Description of Artificial Sequence:  Hypothetical Probe Sequence
gcaagtgcgtgcaaaggctt

SEQ ID NO: 6330 - DNA, 20 bp, Artificial Sequence
  Description of Artificial Sequence:  Hypothetical Probe Sequence
gcaagtgcacggaccttcgt

SEQ ID NO: 6331 - DNA, 20 bp, Artificial Sequence
  Description of Artificial Sequence:  Hypothetical Probe Sequence
ggacaatccgaatgcggcaa

SEQ ID NO: 6332 - DNA, 20 bp, Artificial Sequence
  Description of Artificial Sequence:  Hypothetical Probe Sequence
ggactcgtggacgtgcgtgc

SEQ ID NO: 6333 - DNA, 20 bp, Artificial Sequence
  Description of Artificial Sequence:  Hypothetical Probe Sequence
ggacctgttctggcaaacgg

SEQ ID NO: 6334 - DNA, 20 bp, Artificial Sequence
  Description of Artificial Sequence:  Hypothetical Probe Sequence
gcaaggacatcgccattccc

SEQ ID NO: 6335 - DNA, 20 bp, Artificial Sequence
  Description of Artificial Sequence:  Hypothetical Probe Sequence
ggaccagcttagggactgcg

SEQ ID NO: 6336 - DNA, 20 bp, Artificial Sequence
  Description of Artificial Sequence:  Hypothetical Probe Sequence
gcaaggacggacaggagctt

SEQ ID NO: 6337 - DNA, 20 bp, Artificial Sequence
  Description of Artificial Sequence:  Hypothetical Probe Sequence
acggctgtcacgtgatcgaa

SEQ ID NO: 6338 - DNA, 20 bp, Artificial Sequence
  Description of Artificial Sequence:  Hypothetical Probe Sequence
gcaaacgggcttgtgcccta

SEQ ID NO: 6339 - DNA, 20 bp, Artificial Sequence
  Description of Artificial Sequence:  Hypothetical Probe Sequence
acgggtctgagtcacgcacg

SEQ ID NO: 6340 - DNA, 20 bp, Artificial Sequence
  Description of Artificial Sequence:  Hypothetical Probe Sequence
acggagtgctcacagccgtt

SEQ ID NO: 6341 - DNA, 20 bp, Artificial Sequence
  Description of Artificial Sequence:  Hypothetical Probe Sequence
acggtgcgcgaagtctgtgc

SEQ ID NO: 6342 - DNA, 20 bp, Artificial Sequence
  Description of Artificial Sequence:  Hypothetical Probe Sequence
acggggacgatgtctgcgaa

SEQ ID NO: 6343 - DNA, 20 bp, Artificial Sequence
  Description of Artificial Sequence:  Hypothetical Probe Sequence
gcaaagccgtctgtctgcaa

SEQ ID NO: 6344 - DNA, 20 bp, Artificial Sequence
  Description of Artificial Sequence:  Hypothetical Probe Sequence
gcaaagccacctccatcgaa

SEQ ID NO: 6345 - DNA, 20 bp, Artificial Sequence
  Description of Artificial Sequence:  Hypothetical Probe Sequence
agccaggaacctaaaggcaa

SEQ ID NO: 6346 - DNA, 20 bp, Artificial Sequence
  Description of Artificial Sequence:  Hypothetical Probe Sequence
gcaaagcccctagtgccgaa

SEQ ID NO: 6347 - DNA, 20 bp, Artificial Sequence
  Description of Artificial Sequence:  Hypothetical Probe Sequence
agcctcccctgtggtaagcc

SEQ ID NO: 6348 - DNA, 20 bp, Artificial Sequence
  Description of Artificial Sequence:  Hypothetical Probe Sequence
aatccgaaaggagtgctgcg

SEQ ID NO: 6349 - DNA, 20 bp, Artificial Sequence
  Description of Artificial Sequence:  Hypothetical Probe Sequence
aatcacggcagcagccacgg

SEQ ID NO: 6350 - DNA, 20 bp, Artificial Sequence
  Description of Artificial Sequence:  Hypothetical Probe Sequence
tctgcacgcagccacggacc

SEQ ID NO: 6351 - DNA, 20 bp, Artificial Sequence
  Description of Artificial Sequence:  Hypothetical Probe Sequence
tcgtacggaccttgcgtgcg

SEQ ID NO: 6352 - DNA, 20 bp, Artificial Sequence
  Description of Artificial Sequence:  Hypothetical Probe Sequence
agtgcttgccatagccagcc

SEQ ID NO: 6353 - DNA, 20 bp, Artificial Sequence
  Description of Artificial Sequence:  Hypothetical Probe Sequence
cttgggtaggacgtgcgatg

SEQ ID NO: 6354 - DNA, 20 bp, Artificial Sequence
  Description of Artificial Sequence:  Hypothetical Probe Sequence
cttgcctaccatagcccgaa

SEQ ID NO: 6355 - DNA, 20 bp, Artificial Sequence
  Description of Artificial Sequence:  Hypothetical Probe Sequence
agtgcttgggactgcgggta

SEQ ID NO: 6356 - DNA, 20 bp, Artificial Sequence
  Description of Artificial Sequence:  Hypothetical Probe Sequence
cgtttcgtagtgggactgcg

SEQ ID NO: 6357 - DNA, 20 bp, Artificial Sequence
  Description of Artificial Sequence:  Hypothetical Probe Sequence
cgttgtctgatgcgtttgcg

SEQ ID NO: 6358 - DNA, 20 bp, Artificial Sequence
  Description of Artificial Sequence:  Hypothetical Probe Sequence
ctcatccccgaaggacgacc

SEQ ID NO: 6359 - DNA, 20 bp, Artificial Sequence
  Description of Artificial Sequence:  Hypothetical Probe Sequence
ctgttcccatcggtgccagc

SEQ ID NO: 6360 - DNA, 20 bp, Artificial Sequence
  Description of Artificial Sequence:  Hypothetical Probe Sequence
ccatcttgacggctcaacgg

SEQ ID NO: 6361 - DNA, 20 bp, Artificial Sequence
  Description of Artificial Sequence:  Hypothetical Probe Sequence
cgaatgcgaaagttgaagcc

SEQ ID NO: 6362 - DNA, 20 bp, Artificial Sequence
  Description of Artificial Sequence:  Hypothetical Probe Sequence
gcttcgttcttgcacgtccc

SEQ ID NO: 6363 - DNA, 20 bp, Artificial Sequence
  Description of Artificial Sequence:  Hypothetical Probe Sequence
gctttcccggaccctacacg

SEQ ID NO: 6364 - DNA, 20 bp, Artificial Sequence
  Description of Artificial Sequence:  Hypothetical Probe Sequence
gctttgcgcctagatggctt

SEQ ID NO: 6365 - DNA, 20 bp, Artificial Sequence
  Description of Artificial Sequence:  Hypothetical Probe Sequence
gcttgaccctgtacggcagc

SEQ ID NO: 6366 - DNA, 20 bp, Artificial Sequence
  Description of Artificial Sequence:  Hypothetical Probe Sequence
gcttagcctcgtgacccacg

SEQ ID NO: 6367 - DNA, 20 bp, Artificial Sequence
  Description of Artificial Sequence:  Hypothetical Probe Sequence
ggtacgttacgggtgcccat

SEQ ID NO: 6368 - DNA, 20 bp, Artificial Sequence
  Description of Artificial Sequence:  Hypothetical Probe Sequence
ggtatgcggcttgaccctca

SEQ ID NO: 6369 - DNA, 20 bp, Artificial Sequence
  Description of Artificial Sequence:  Hypothetical Probe Sequence
gcaaaaagtctgctgttgcg

SEQ ID NO: 6370 - DNA, 20 bp, Artificial Sequence
  Description of Artificial Sequence:  Hypothetical Probe Sequence
gcaaagtgagcctgcgcagc

SEQ ID NO: 6371 - DNA, 20 bp, Artificial Sequence
  Description of Artificial Sequence:  Hypothetical Probe Sequence
gcaagacctcgtgtgcgtgc

SEQ ID NO: 6372 - DNA, 20 bp, Artificial Sequence
  Description of Artificial Sequence:  Hypothetical Probe Sequence
atcgctcaacggagccggta

SEQ ID NO: 6373 - DNA, 20 bp, Artificial Sequence
  Description of Artificial Sequence:  Hypothetical Probe Sequence
atcgtgcgaccttgtcacgg

SEQ ID NO: 6374 - DNA, 20 bp, Artificial Sequence
  Description of Artificial Sequence:  Hypothetical Probe Sequence
atcgcagcaccttgcggagt

SEQ ID NO: 6375 - DNA, 20 bp, Artificial Sequence
  Description of Artificial Sequence:  Hypothetical Probe Sequence
atcggtgcatcggcttgcaa

SEQ ID NO: 6376 - DNA, 20 bp, Artificial Sequence
  Description of Artificial Sequence:  Hypothetical Probe Sequence
atcgacggggtatcccacgg

SEQ ID NO: 6377 - DNA, 20 bp, Artificial Sequence
  Description of Artificial Sequence:  Hypothetical Probe Sequence
cctatccccttggcttcgtt

SEQ ID NO: 6378 - DNA, 20 bp, Artificial Sequence
  Description of Artificial Sequence:  Hypothetical Probe Sequence
cctacagcgcaatgcgcacg

SEQ ID NO: 6379 - DNA, 20 bp, Artificial Sequence
  Description of Artificial Sequence:  Hypothetical Probe Sequence
cctagtgcgcttacgggcaa

SEQ ID NO: 6380 - DNA, 20 bp, Artificial Sequence
  Description of Artificial Sequence:  Hypothetical Probe Sequence
gatgagccggacacggccta

SEQ ID NO: 6381 - DNA, 20 bp, Artificial Sequence
  Description of Artificial Sequence:  Hypothetical Probe Sequence
tccctcgtagccagccagga

SEQ ID NO: 6382 - DNA, 20 bp, Artificial Sequence
  Description of Artificial Sequence:  Hypothetical Probe Sequence
tcccctgttcccgatgcagc

SEQ ID NO: 6383 - DNA, 20 bp, Artificial Sequence
  Description of Artificial Sequence:  Hypothetical Probe Sequence
tcccgtgcataccgaaatcg

SEQ ID NO: 6384 - DNA, 20 bp, Artificial Sequence
  Description of Artificial Sequence:  Hypothetical Probe Sequence
tgcgaatctgcgcagcagga

SEQ ID NO: 6385 - DNA, 20 bp, Artificial Sequence
  Description of Artificial Sequence:  Hypothetical Probe Sequence
tgcgcttggtctgaccacgg

SEQ ID NO: 6386 - DNA, 20 bp, Artificial Sequence
  Description of Artificial Sequence:  Hypothetical Probe Sequence
tgcgcgaactgtgatgccat

SEQ ID NO: 6387 - DNA, 20 bp, Artificial Sequence
  Description of Artificial Sequence:  Hypothetical Probe Sequence
tgcgcctagagtagccgctt

SEQ ID NO: 6388 - DNA, 20 bp, Artificial Sequence
  Description of Artificial Sequence:  Hypothetical Probe Sequence
tgcgtgcgtacacacgccat

SEQ ID NO: 6389 - DNA, 20 bp, Artificial Sequence
  Description of Artificial Sequence:  Hypothetical Probe Sequence
agtgcacgcgttaaagagcc

SEQ ID NO: 6390 - DNA, 20 bp, Artificial Sequence
  Description of Artificial Sequence:  Hypothetical Probe Sequence
cacgcgaatacacagcacgg

SEQ ID NO: 6391 - DNA, 20 bp, Artificial Sequence
  Description of Artificial Sequence:  Hypothetical Probe Sequence
cacgtgcgcgtttacaagcc

SEQ ID NO: 6392 - DNA, 20 bp, Artificial Sequence
  Description of Artificial Sequence:  Hypothetical Probe Sequence
cacggaccttagagccccat

SEQ ID NO: 6393 - DNA, 20 bp, Artificial Sequence
  Description of Artificial Sequence:  Hypothetical Probe Sequence
cagcgcttcctaaaaggtgc

SEQ ID NO: 6394 - DNA, 20 bp, Artificial Sequence
  Description of Artificial Sequence:  Hypothetical Probe Sequence
gaccgcaacctagtgcatcg

SEQ ID NO: 6395 - DNA, 20 bp, Artificial Sequence
  Description of Artificial Sequence:  Hypothetical Probe Sequence
gaccggactctgtcccgacc

SEQ ID NO: 6396 - DNA, 20 bp, Artificial Sequence
  Description of Artificial Sequence:  Hypothetical Probe Sequence
gtgcaatcctcagtgctccc

SEQ ID NO: 6397 - DNA, 20 bp, Artificial Sequence
  Description of Artificial Sequence:  Hypothetical Probe Sequence
gtgcccatcgaagcttggac

SEQ ID NO: 6398 - DNA, 20 bp, Artificial Sequence
  Description of Artificial Sequence:  Hypothetical Probe Sequence
gtgcgtctatactgcgcagc

SEQ ID NO: 6399 - DNA, 20 bp, Artificial Sequence
  Description of Artificial Sequence:  Hypothetical Probe Sequence
gtgcgagtcctatgcggacc

SEQ ID NO: 6400 - DNA, 20 bp, Artificial Sequence
  Description of Artificial Sequence:  Hypothetical Probe Sequence
ggactcgtcttgatcgtgcg

SEQ ID NO: 6401 - DNA, 20 bp, Artificial Sequence
  Description of Artificial Sequence:  Hypothetical Probe Sequence
ggacccataatccttgtgcg

SEQ ID NO: 6402 - DNA, 20 bp, Artificial Sequence
  Description of Artificial Sequence:  Hypothetical Probe Sequence
acggctcagtgctgcgccat

SEQ ID NO: 6403 - DNA, 20 bp, Artificial Sequence
  Description of Artificial Sequence:  Hypothetical Probe Sequence
acggggtacttgggacgtgc

SEQ ID NO: 6404 - DNA, 20 bp, Artificial Sequence
  Description of Artificial Sequence:  Hypothetical Probe Sequence
acgggatgtgattccccgtt

SEQ ID NO: 6405 - DNA, 20 bp, Artificial Sequence
  Description of Artificial Sequence:  Hypothetical Probe Sequence
acggggacgtcttcccagga

SEQ ID NO: 6406 - DNA, 20 bp, Artificial Sequence
  Description of Artificial Sequence:  Hypothetical Probe Sequence
agcccttgataccagcgcaa

SEQ ID NO: 6407 - DNA, 20 bp, Artificial Sequence
  Description of Artificial Sequence:  Hypothetical Probe Sequence
agccatcgaaagcgttcgaa

SEQ ID NO: 6408 - DNA, 20 bp, Artificial Sequence
  Description of Artificial Sequence:  Hypothetical Probe Sequence
agccggacgtctagccacgg

SEQ ID NO: 6409 - DNA, 20 bp, Artificial Sequence
  Description of Artificial Sequence:  Hypothetical Probe Sequence
ttgacgaatgcgacggtcgt

SEQ ID NO: 6410 - DNA, 20 bp, Artificial Sequence
  Description of Artificial Sequence:  Hypothetical Probe Sequence
accttgattgcgtgcggtct

SEQ ID NO: 6411 - DNA, 20 bp, Artificial Sequence
  Description of Artificial Sequence:  Hypothetical Probe Sequence
accttctgcttgtgcggctt

SEQ ID NO: 6412 - DNA, 20 bp, Artificial Sequence
  Description of Artificial Sequence:  Hypothetical Probe Sequence
tctgtgcgcagcgtcttccc

SEQ ID NO: 6413 - DNA, 20 bp, Artificial Sequence
  Description of Artificial Sequence:  Hypothetical Probe Sequence
tgtcccatgtgcccatcacg

SEQ ID NO: 6414 - DNA, 20 bp, Artificial Sequence
  Description of Artificial Sequence:  Hypothetical Probe Sequence
tcgttcgtatcgtgcgagcc

SEQ ID NO: 6415 - DNA, 20 bp, Artificial Sequence
  Description of Artificial Sequence:  Hypothetical Probe Sequence
tcgtcgttacggccatacgg

SEQ ID NO: 6416 - DNA, 20 bp, Artificial Sequence
  Description of Artificial Sequence:  Hypothetical Probe Sequence
tcgttcccttaggatgtgcg

SEQ ID NO: 6417 - DNA, 20 bp, Artificial Sequence
  Description of Artificial Sequence:  Hypothetical Probe Sequence
tcgtcagcacggtgcgctca

SEQ ID NO: 6418 - DNA, 20 bp, Artificial Sequence
  Description of Artificial Sequence:  Hypothetical Probe Sequence
cttggcttcctatgcgtgcg

SEQ ID NO: 6419 - DNA, 20 bp, Artificial Sequence
  Description of Artificial Sequence:  Hypothetical Probe Sequence
cgttcttgccatacggcgaa

SEQ ID NO: 6420 - DNA, 20 bp, Artificial Sequence
  Description of Artificial Sequence:  Hypothetical Probe Sequence
cgttccatagccctgtgtgc

SEQ ID NO: 6421 - DNA, 20 bp, Artificial Sequence
  Description of Artificial Sequence:  Hypothetical Probe Sequence
ccatcacggcttgagttgcg

SEQ ID NO: 6422 - DNA, 20 bp, Artificial Sequence
  Description of Artificial Sequence:  Hypothetical Probe Sequence
ccatacgggatgcacgccta

SEQ ID NO: 6423 - DNA, 20 bp, Artificial Sequence
  Description of Artificial Sequence:  Hypothetical Probe Sequence
cgaacgttagcccagcgagt

SEQ ID NO: 6424 - DNA, 20 bp, Artificial Sequence
  Description of Artificial Sequence:  Hypothetical Probe Sequence
cgaaggtatgcgctcatgcg

SEQ ID NO: 6425 - DNA, 20 bp, Artificial Sequence
  Description of Artificial Sequence:  Hypothetical Probe Sequence
acctgcttcttgtccccacg

SEQ ID NO: 6426 - DNA, 20 bp, Artificial Sequence
  Description of Artificial Sequence:  Hypothetical Probe Sequence
acctgctttgcggagtcgaa

SEQ ID NO: 6427 - DNA, 20 bp, Artificial Sequence
  Description of Artificial Sequence:  Hypothetical Probe Sequence
gcttcagccttgcacgtgcg

SEQ ID NO: 6428 - DNA, 20 bp, Artificial Sequence
  Description of Artificial Sequence:  Hypothetical Probe Sequence
gcaatgatgcaatgcgtgcg

SEQ ID NO: 6429 - DNA, 20 bp, Artificial Sequence
  Description of Artificial Sequence:  Hypothetical Probe Sequence
gcaagagtcttggtgcagcc

SEQ ID NO: 6430 - DNA, 20 bp, Artificial Sequence
  Description of Artificial Sequence:  Hypothetical Probe Sequence
agtgccattctgcagcgctt

SEQ ID NO: 6431 - DNA, 20 bp, Artificial Sequence
  Description of Artificial Sequence:  Hypothetical Probe Sequence
tcccaatcgatggtgcatcg

SEQ ID NO: 6432 - DNA, 20 bp, Artificial Sequence
  Description of Artificial Sequence:  Hypothetical Probe Sequence
tcccaaagtgattgcggtgc

SEQ ID NO: 6433 - DNA, 20 bp, Artificial Sequence
  Description of Artificial Sequence:  Hypothetical Probe Sequence
tcccctgtcagcgagttcgt

SEQ ID NO: 6434 - DNA, 20 bp, Artificial Sequence
  Description of Artificial Sequence:  Hypothetical Probe Sequence
tcccacctcgaacacgccta

SEQ ID NO: 6435 - DNA, 20 bp, Artificial Sequence
  Description of Artificial Sequence:  Hypothetical Probe Sequence
tcccatcgtcgtcacgtcgt

SEQ ID NO: 6436 - DNA, 20 bp, Artificial Sequence
  Description of Artificial Sequence:  Hypothetical Probe Sequence
accttccccctaagcctccc

SEQ ID NO: 6437 - DNA, 20 bp, Artificial Sequence
  Description of Artificial Sequence:  Hypothetical Probe Sequence
tcccacggctcagatgacgg

SEQ ID NO: 6438 - DNA, 20 bp, Artificial Sequence
  Description of Artificial Sequence:  Hypothetical Probe Sequence
tgcgttgatgattgcgtcgt

SEQ ID NO: 6439 - DNA, 20 bp, Artificial Sequence
  Description of Artificial Sequence:  Hypothetical Probe Sequence
tgcgcgaaaaagtcgtcgtt

SEQ ID NO: 6440 - DNA, 20 bp, Artificial Sequence
  Description of Artificial Sequence:  Hypothetical Probe Sequence
tgcggcttgctttcgtctca

SEQ ID NO: 6441 - DNA, 20 bp, Artificial Sequence
  Description of Artificial Sequence:  Hypothetical Probe Sequence
tgcgacggcagcacctctca

SEQ ID NO: 6442 - DNA, 20 bp, Artificial Sequence
  Description of Artificial Sequence:  Hypothetical Probe Sequence
cacgaaagtcccagccacgg

SEQ ID NO: 6443 - DNA, 20 bp, Artificial Sequence
  Description of Artificial Sequence:  Hypothetical Probe Sequence
acctcacggtcttccccgaa

SEQ ID NO: 6444 - DNA, 20 bp, Artificial Sequence
  Description of Artificial Sequence:  Hypothetical Probe Sequence
cacggagtctgtacggtgcg

SEQ ID NO: 6445 - DNA, 20 bp, Artificial Sequence
  Description of Artificial Sequence:  Hypothetical Probe Sequence
cacgtcccccatacggctca

SEQ ID NO: 6446 - DNA, 20 bp, Artificial Sequence
  Description of Artificial Sequence:  Hypothetical Probe Sequence
gacccgaactgtggaccagc

SEQ ID NO: 6447 - DNA, 20 bp, Artificial Sequence
  Description of Artificial Sequence:  Hypothetical Probe Sequence
acctgacccacgaaaggcaa

SEQ ID NO: 6448 - DNA, 20 bp, Artificial Sequence
  Description of Artificial Sequence:  Hypothetical Probe Sequence
acctgaccacggttgatgcg

SEQ ID NO: 6449 - DNA, 20 bp, Artificial Sequence
  Description of Artificial Sequence:  Hypothetical Probe Sequence
gtgcctcagcaagatgacgg

SEQ ID NO: 6450 - DNA, 20 bp, Artificial Sequence
  Description of Artificial Sequence:  Hypothetical Probe Sequence
gtgcgagtcgaaacgggtgc

SEQ ID NO: 6451 - DNA, 20 bp, Artificial Sequence
  Description of Artificial Sequence:  Hypothetical Probe Sequence
gtgcacctcagcgatgcagc

SEQ ID NO: 6452 - DNA, 20 bp, Artificial Sequence
  Description of Artificial Sequence:  Hypothetical Probe Sequence
acctgtgcaggatcccacgg

SEQ ID NO: 6453 - DNA, 20 bp, Artificial Sequence
  Description of Artificial Sequence:  Hypothetical Probe Sequence
gtgccctacacgggacatcg

SEQ ID NO: 6454 - DNA, 20 bp, Artificial Sequence
  Description of Artificial Sequence:  Hypothetical Probe Sequence
ggaccttgtgcgaatcgctt

SEQ ID NO: 6455 - DNA, 20 bp, Artificial Sequence
  Description of Artificial Sequence:  Hypothetical Probe Sequence
acctggacgatgtgcgctgt

SEQ ID NO: 6456 - DNA, 20 bp, Artificial Sequence
  Description of Artificial Sequence:  Hypothetical Probe Sequence
ggactccctcgtcagcgatg

SEQ ID NO: 6457 - DNA, 20 bp, Artificial Sequence
  Description of Artificial Sequence:  Hypothetical Probe Sequence
ggacagccaatccacgagcc

SEQ ID NO: 6458 - DNA, 20 bp, Artificial Sequence
  Description of Artificial Sequence:  Hypothetical Probe Sequence
acggttgacgaagcaatgcg

SEQ ID NO: 6459 - DNA, 20 bp, Artificial Sequence
  Description of Artificial Sequence:  Hypothetical Probe Sequence
acggcgttcgaagcttggta

SEQ ID NO: 6460 - DNA, 20 bp, Artificial Sequence
  Description of Artificial Sequence:  Hypothetical Probe Sequence
ttgacgaaagccagccgcaa

SEQ ID NO: 6461 - DNA, 20 bp, Artificial Sequence
  Description of Artificial Sequence:  Hypothetical Probe Sequence
ttgaaggatgcggaccatcg

SEQ ID NO: 6462 - DNA, 20 bp, Artificial Sequence
  Description of Artificial Sequence:  Hypothetical Probe Sequence
ttgaacggtgcgtctggatg

SEQ ID NO: 6463 - DNA, 20 bp, Artificial Sequence
  Description of Artificial Sequence:  Hypothetical Probe Sequence
tgatcacggtgcacggcgaa

SEQ ID NO: 6464 - DNA, 20 bp, Artificial Sequence
  Description of Artificial Sequence:  Hypothetical Probe Sequence
ttaggtgcaccttgcgccta

SEQ ID NO: 6465 - DNA, 20 bp, Artificial Sequence
  Description of Artificial Sequence:  Hypothetical Probe Sequence
atcgaatccgttacggtgcg

SEQ ID NO: 6466 - DNA, 20 bp, Artificial Sequence
  Description of Artificial Sequence:  Hypothetical Probe Sequence
aatcctcaatcggcaacacg

SEQ ID NO: 6467 - DNA, 20 bp, Artificial Sequence
  Description of Artificial Sequence:  Hypothetical Probe Sequence
aatcatcgggacagccacgg

SEQ ID NO: 6468 - DNA, 20 bp, Artificial Sequence
  Description of Artificial Sequence:  Hypothetical Probe Sequence
aatcgacctgcgtcccatcg

SEQ ID NO: 6469 - DNA, 20 bp, Artificial Sequence
  Description of Artificial Sequence:  Hypothetical Probe Sequence
aatcggaccttgatcggtgc

SEQ ID NO: 6470 - DNA, 20 bp, Artificial Sequence
  Description of Artificial Sequence:  Hypothetical Probe Sequence
atcgatacgctttgcgctgt

SEQ ID NO: 6471 - DNA, 20 bp, Artificial Sequence
  Description of Artificial Sequence:  Hypothetical Probe Sequence
ataccagcccattgcggcaa

SEQ ID NO: 6472 - DNA, 20 bp, Artificial Sequence
  Description of Artificial Sequence:  Hypothetical Probe Sequence
atacacggttgaacggcgaa

SEQ ID NO: 6473 - DNA, 20 bp, Artificial Sequence
  Description of Artificial Sequence:  Hypothetical Probe Sequence
tctgccatgcttcacgacgg

SEQ ID NO: 6474 - DNA, 20 bp, Artificial Sequence
  Description of Artificial Sequence:  Hypothetical Probe Sequence
tctgcctaagccgatgacgg

SEQ ID NO: 6475 - DNA, 20 bp, Artificial Sequence
  Description of Artificial Sequence:  Hypothetical Probe Sequence
tctgcagcggacagtggcaa

SEQ ID NO: 6476 - DNA, 20 bp, Artificial Sequence
  Description of Artificial Sequence:  Hypothetical Probe Sequence
tgtcccattcgtgcaacacg

SEQ ID NO: 6477 - DNA, 20 bp, Artificial Sequence
  Description of Artificial Sequence:  Hypothetical Probe Sequence
tgtcgtgcgatgacggtgcg

SEQ ID NO: 6478 - DNA, 20 bp, Artificial Sequence
  Description of Artificial Sequence:  Hypothetical Probe Sequence
tcgtttgacacgggacgcaa

SEQ ID NO: 6479 - DNA, 20 bp, Artificial Sequence
  Description of Artificial Sequence:  Hypothetical Probe Sequence
tcgtgatgggacgctttccc

SEQ ID NO: 6480 - DNA, 20 bp, Artificial Sequence
  Description of Artificial Sequence:  Hypothetical Probe Sequence
tcgtgtgcttgactgttgcg

SEQ ID NO: 6481 - DNA, 20 bp, Artificial Sequence
  Description of Artificial Sequence:  Hypothetical Probe Sequence
tcgtagcccagctctgcgaa

SEQ ID NO: 6482 - DNA, 20 bp, Artificial Sequence
  Description of Artificial Sequence:  Hypothetical Probe Sequence
atcgcttgcttgcgaagcaa

SEQ ID NO: 6483 - DNA, 20 bp, Artificial Sequence
  Description of Artificial Sequence:  Hypothetical Probe Sequence
atcgcttgggtatcgttgcg

SEQ ID NO: 6484 - DNA, 20 bp, Artificial Sequence
  Description of Artificial Sequence:  Hypothetical Probe Sequence
atcgcttgaccttgtcgctt

SEQ ID NO: 6485 - DNA, 20 bp, Artificial Sequence
  Description of Artificial Sequence:  Hypothetical Probe Sequence
cttgcctatgatcagcagcc

SEQ ID NO: 6486 - DNA, 20 bp, Artificial Sequence
  Description of Artificial Sequence:  Hypothetical Probe Sequence
atcgcttgcacggagttccc

SEQ ID NO: 6487 - DNA, 20 bp, Artificial Sequence
  Description of Artificial Sequence:  Hypothetical Probe Sequence
cgtttgatacggtctggtgc

SEQ ID NO: 6488 - DNA, 20 bp, Artificial Sequence
  Description of Artificial Sequence:  Hypothetical Probe Sequence
cgttttaggcttagccgctt

SEQ ID NO: 6489 - DNA, 20 bp, Artificial Sequence
  Description of Artificial Sequence:  Hypothetical Probe Sequence
atcgcgttaaagcacggtct

SEQ ID NO: 6490 - DNA, 20 bp, Artificial Sequence
  Description of Artificial Sequence:  Hypothetical Probe Sequence
atcgcgttcttgggtaagcc

SEQ ID NO: 6491 - DNA, 20 bp, Artificial Sequence
  Description of Artificial Sequence:  Hypothetical Probe Sequence
atcgcgttcgttcagcatcg

SEQ ID NO: 6492 - DNA, 20 bp, Artificial Sequence
  Description of Artificial Sequence:  Hypothetical Probe Sequence
atcgcgttctgttccccgaa

SEQ ID NO: 6493 - DNA, 20 bp, Artificial Sequence
  Description of Artificial Sequence:  Hypothetical Probe Sequence
atcgcgttggtatgtccagc

SEQ ID NO: 6494 - DNA, 20 bp, Artificial Sequence
  Description of Artificial Sequence:  Hypothetical Probe Sequence
cgttagtgtctgacggcacg

SEQ ID NO: 6495 - DNA, 20 bp, Artificial Sequence
  Description of Artificial Sequence:  Hypothetical Probe Sequence
cgttatcggcttagtgcacg

SEQ ID NO: 6496 - DNA, 20 bp, Artificial Sequence
  Description of Artificial Sequence:  Hypothetical Probe Sequence
cgttgatgtacaccattgcg

SEQ ID NO: 6497 - DNA, 20 bp, Artificial Sequence
  Description of Artificial Sequence:  Hypothetical Probe Sequence
atcgcgttggactacaagcc

SEQ ID NO: 6498 - DNA, 20 bp, Artificial Sequence
  Description of Artificial Sequence:  Hypothetical Probe Sequence
ctcatgatacggtccccacg

SEQ ID NO: 6499 - DNA, 20 bp, Artificial Sequence
  Description of Artificial Sequence:  Hypothetical Probe Sequence
atcgctcacgtttgcgacct

SEQ ID NO: 6500 - DNA, 20 bp, Artificial Sequence
  Description of Artificial Sequence:  Hypothetical Probe Sequence
ctcagatggcaagacctgcg

SEQ ID NO: 6501 - DNA, 20 bp, Artificial Sequence
  Description of Artificial Sequence:  Hypothetical Probe Sequence
ctgttgattcccagcctgcg

SEQ ID NO: 6502 - DNA, 20 bp, Artificial Sequence
  Description of Artificial Sequence:  Hypothetical Probe Sequence
atcgctgttgtccacgcacg

SEQ ID NO: 6503 - DNA, 20 bp, Artificial Sequence
  Description of Artificial Sequence:  Hypothetical Probe Sequence
ctgtcttgccattgcgcagc

SEQ ID NO: 6504 - DNA, 20 bp, Artificial Sequence
  Description of Artificial Sequence:  Hypothetical Probe Sequence
atcgctgtgcaatgcgtgtc

SEQ ID NO: 6505 - DNA, 20 bp, Artificial Sequence
  Description of Artificial Sequence:  Hypothetical Probe Sequence
atcgctgttgcgcgtttgat

SEQ ID NO: 6506 - DNA, 20 bp, Artificial Sequence
  Description of Artificial Sequence:  Hypothetical Probe Sequence
atcgctgtcacgaatctgcg

SEQ ID NO: 6507 - DNA, 20 bp, Artificial Sequence
  Description of Artificial Sequence:  Hypothetical Probe Sequence
ctgtgaccgaccctcatgcg

SEQ ID NO: 6508 - DNA, 20 bp, Artificial Sequence
  Description of Artificial Sequence:  Hypothetical Probe Sequence
atcgccatttgatgcgtgat

SEQ ID NO: 6509 - DNA, 20 bp, Artificial Sequence
  Description of Artificial Sequence:  Hypothetical Probe Sequence
ccattgatcgaacttgcgaa

SEQ ID NO: 6510 - DNA, 20 bp, Artificial Sequence
  Description of Artificial Sequence:  Hypothetical Probe Sequence
atcgccattcgtaatccgtt

SEQ ID NO: 6511 - DNA, 20 bp, Artificial Sequence
  Description of Artificial Sequence:  Hypothetical Probe Sequence
atcgccatcttgaaagcttg

SEQ ID NO: 6512 - DNA, 20 bp, Artificial Sequence
  Description of Artificial Sequence:  Hypothetical Probe Sequence
atcgccatctcacttgcgaa

SEQ ID NO: 6513 - DNA, 20 bp, Artificial Sequence
  Description of Artificial Sequence:  Hypothetical Probe Sequence
atcgccatgcttctgtgtgc

SEQ ID NO: 6514 - DNA, 20 bp, Artificial Sequence
  Description of Artificial Sequence:  Hypothetical Probe Sequence
atcgccataggaagcccgtt

SEQ ID NO: 6515 - DNA, 20 bp, Artificial Sequence
  Description of Artificial Sequence:  Hypothetical Probe Sequence
atcgccatcctaaggaacgg

SEQ ID NO: 6516 - DNA, 20 bp, Artificial Sequence
  Description of Artificial Sequence:  Hypothetical Probe Sequence
atcgccatgtgcttaggcaa

SEQ ID NO: 6517 - DNA, 20 bp, Artificial Sequence
  Description of Artificial Sequence:  Hypothetical Probe Sequence
cgaaatacctcatcccacgg

SEQ ID NO: 6518 - DNA, 20 bp, Artificial Sequence
  Description of Artificial Sequence:  Hypothetical Probe Sequence
atcgcgaatctgctcatgcg

SEQ ID NO: 6519 - DNA, 20 bp, Artificial Sequence
  Description of Artificial Sequence:  Hypothetical Probe Sequence
cgaatcgtggtaaatcgtgc

SEQ ID NO: 6520 - DNA, 20 bp, Artificial Sequence
  Description of Artificial Sequence:  Hypothetical Probe Sequence
atcgcgaactgtcttgcacg

SEQ ID NO: 6521 - DNA, 20 bp, Artificial Sequence
  Description of Artificial Sequence:  Hypothetical Probe Sequence
cgaaggtattgagaccagcc

SEQ ID NO: 6522 - DNA, 20 bp, Artificial Sequence
  Description of Artificial Sequence:  Hypothetical Probe Sequence
atcgcgaagtctcgaagcaa

SEQ ID NO: 6523 - DNA, 20 bp, Artificial Sequence
  Description of Artificial Sequence:  Hypothetical Probe Sequence
atcgcgaaacctccatggta

SEQ ID NO: 6524 - DNA, 20 bp, Artificial Sequence
  Description of Artificial Sequence:  Hypothetical Probe Sequence
atcgcgaacctacagctcgt

SEQ ID NO: 6525 - DNA, 20 bp, Artificial Sequence
  Description of Artificial Sequence:  Hypothetical Probe Sequence
atcgcgaatgcgtgtcgcaa

SEQ ID NO: 6526 - DNA, 20 bp, Artificial Sequence
  Description of Artificial Sequence:  Hypothetical Probe Sequence
cgaagaccataccacgacgg

SEQ ID NO: 6527 - DNA, 20 bp, Artificial Sequence
  Description of Artificial Sequence:  Hypothetical Probe Sequence
gcttttagccatcagctgcg

SEQ ID NO: 6528 - DNA, 20 bp, Artificial Sequence
  Description of Artificial Sequence:  Hypothetical Probe Sequence
gctttacaccatgtgcggac

SEQ ID NO: 6529 - DNA, 20 bp, Artificial Sequence
  Description of Artificial Sequence:  Hypothetical Probe Sequence
gctttctgttgacagcgacc

SEQ ID NO: 6530 - DNA, 20 bp, Artificial Sequence
  Description of Artificial Sequence:  Hypothetical Probe Sequence
atcggcttcgttgaccacct

SEQ ID NO: 6531 - DNA, 20 bp, Artificial Sequence
  Description of Artificial Sequence:  Hypothetical Probe Sequence
gcttctgtatcggacccagc

SEQ ID NO: 6532 - DNA, 20 bp, Artificial Sequence
  Description of Artificial Sequence:  Hypothetical Probe Sequence
atcggcttgtgcttagcagc

SEQ ID NO: 6533 - DNA, 20 bp, Artificial Sequence
  Description of Artificial Sequence:  Hypothetical Probe Sequence
ggtacgttaggacacgcgtt

SEQ ID NO: 6534 - DNA, 20 bp, Artificial Sequence
  Description of Artificial Sequence:  Hypothetical Probe Sequence
ggtagcaagtctcagcgtgc

SEQ ID NO: 6535 - DNA, 20 bp, Artificial Sequence
  Description of Artificial Sequence:  Hypothetical Probe Sequence
atcgggtaaggaacctgcaa

SEQ ID NO: 6536 - DNA, 20 bp, Artificial Sequence
  Description of Artificial Sequence:  Hypothetical Probe Sequence
atcgggtatcccaggaccat

SEQ ID NO: 6537 - DNA, 20 bp, Artificial Sequence
  Description of Artificial Sequence:  Hypothetical Probe Sequence
atcgggtaacggtacagcaa

SEQ ID NO: 6538 - DNA, 20 bp, Artificial Sequence
  Description of Artificial Sequence:  Hypothetical Probe Sequence
atcgggtaagcctgatacgg

SEQ ID NO: 6539 - DNA, 20 bp, Artificial Sequence
  Description of Artificial Sequence:  Hypothetical Probe Sequence
atcggtctcgaaaatcgcaa

SEQ ID NO: 6540 - DNA, 20 bp, Artificial Sequence
  Description of Artificial Sequence:  Hypothetical Probe Sequence
atcggtctgcttagccggta

SEQ ID NO: 6541 - DNA, 20 bp, Artificial Sequence
  Description of Artificial Sequence:  Hypothetical Probe Sequence
gtctatcgcacgggaccagc

SEQ ID NO: 6542 - DNA, 20 bp, Artificial Sequence
  Description of Artificial Sequence:  Hypothetical Probe Sequence
atcggtctacggccatggac

SEQ ID NO: 6543 - DNA, 20 bp, Artificial Sequence
  Description of Artificial Sequence:  Hypothetical Probe Sequence
gagtgcaagcttgaccggac

SEQ ID NO: 6544 - DNA, 20 bp, Artificial Sequence
  Description of Artificial Sequence:  Hypothetical Probe Sequence
gagtatcgcttgcagcgcaa

SEQ ID NO: 6545 - DNA, 20 bp, Artificial Sequence
  Description of Artificial Sequence:  Hypothetical Probe Sequence
gagtcagcttagacggcacg

SEQ ID NO: 6546 - DNA, 20 bp, Artificial Sequence
  Description of Artificial Sequence:  Hypothetical Probe Sequence
atcggcaatgattgcgacct

SEQ ID NO: 6547 - DNA, 20 bp, Artificial Sequence
  Description of Artificial Sequence:  Hypothetical Probe Sequence
atcggcaatacaaatcgcaa

SEQ ID NO: 6548 - DNA, 20 bp, Artificial Sequence
  Description of Artificial Sequence:  Hypothetical Probe Sequence
gcaatgtctccctctgcacg

SEQ ID NO: 6549 - DNA, 20 bp, Artificial Sequence
  Description of Artificial Sequence:  Hypothetical Probe Sequence
gcaactcaaaagggaccacg

SEQ ID NO: 6550 - DNA, 20 bp, Artificial Sequence
  Description of Artificial Sequence:  Hypothetical Probe Sequence
gcaaccataccttctggcaa

SEQ ID NO: 6551 - DNA, 20 bp, Artificial Sequence
  Description of Artificial Sequence:  Hypothetical Probe Sequence
gcaagcttttagatcgcgaa

SEQ ID NO: 6552 - DNA, 20 bp, Artificial Sequence
  Description of Artificial Sequence:  Hypothetical Probe Sequence
atcggcaagagtagccgtct

SEQ ID NO: 6553 - DNA, 20 bp, Artificial Sequence
  Description of Artificial Sequence:  Hypothetical Probe Sequence
gcaagcaatcgtagtggcaa

SEQ ID NO: 6554 - DNA, 20 bp, Artificial Sequence
  Description of Artificial Sequence:  Hypothetical Probe Sequence
atcggcaaagtgcttgatcg

SEQ ID NO: 6555 - DNA, 20 bp, Artificial Sequence
  Description of Artificial Sequence:  Hypothetical Probe Sequence
atcggcaaaggaagtggtgc

SEQ ID NO: 6556 - DNA, 20 bp, Artificial Sequence
  Description of Artificial Sequence:  Hypothetical Probe Sequence
atcggcaacagcagtgctgt

SEQ ID NO: 6557 - DNA, 20 bp, Artificial Sequence
  Description of Artificial Sequence:  Hypothetical Probe Sequence
atcggcaaggactgtcggta

SEQ ID NO: 6558 - DNA, 20 bp, Artificial Sequence
  Description of Artificial Sequence:  Hypothetical Probe Sequence
agtgcgaatgatggaccacg

SEQ ID NO: 6559 - DNA, 20 bp, Artificial Sequence
  Description of Artificial Sequence:  Hypothetical Probe Sequence
atcgagtgcctatgcgctca

SEQ ID NO: 6560 - DNA, 20 bp, Artificial Sequence
  Description of Artificial Sequence:  Hypothetical Probe Sequence
agtggtgcttgaacggagcc

SEQ ID NO: 6561 - DNA, 20 bp, Artificial Sequence
  Description of Artificial Sequence:  Hypothetical Probe Sequence
acctggtaacggcacggacc

SEQ ID NO: 6562 - DNA, 20 bp, Artificial Sequence
  Description of Artificial Sequence:  Hypothetical Probe Sequence
acctgcaatctgaggaacgg

SEQ ID NO: 6563 - DNA, 20 bp, Artificial Sequence
  Description of Artificial Sequence:  Hypothetical Probe Sequence
atcgacctggaccacgtgcg

SEQ ID NO: 6564 - DNA, 20 bp, Artificial Sequence
  Description of Artificial Sequence:  Hypothetical Probe Sequence
atcgctgtatcgcagccgaa

SEQ ID NO: 6565 - DNA, 20 bp, Artificial Sequence
  Description of Artificial Sequence:  Hypothetical Probe Sequence
atcggcttaggagacccgtt

SEQ ID NO: 6566 - DNA, 20 bp, Artificial Sequence
  Description of Artificial Sequence:  Hypothetical Probe Sequence
atcgatcgaggaagccggac

SEQ ID NO: 6567 - DNA, 20 bp, Artificial Sequence
  Description of Artificial Sequence:  Hypothetical Probe Sequence
atcggtgccgtttgtcagcc

SEQ ID NO: 6568 - DNA, 20 bp, Artificial Sequence
  Description of Artificial Sequence:  Hypothetical Probe Sequence
aggaacctgcttagcccacg

SEQ ID NO: 6569 - DNA, 20 bp, Artificial Sequence
  Description of Artificial Sequence:  Hypothetical Probe Sequence
aggaatcggtgcctgtgcaa

SEQ ID NO: 6570 - DNA, 20 bp, Artificial Sequence
  Description of Artificial Sequence:  Hypothetical Probe Sequence
atcgcctatgatacggcagc

SEQ ID NO: 6571 - DNA, 20 bp, Artificial Sequence
  Description of Artificial Sequence:  Hypothetical Probe Sequence
cctaaaagctcaagccacgg

SEQ ID NO: 6572 - DNA, 20 bp, Artificial Sequence
  Description of Artificial Sequence:  Hypothetical Probe Sequence
atcgcctatgtcccattgcg

SEQ ID NO: 6573 - DNA, 20 bp, Artificial Sequence
  Description of Artificial Sequence:  Hypothetical Probe Sequence
atcgcctacgtttcgtccat

SEQ ID NO: 6574 - DNA, 20 bp, Artificial Sequence
  Description of Artificial Sequence:  Hypothetical Probe Sequence
atcgcctagctttcccctca

SEQ ID NO: 6575 - DNA, 20 bp, Artificial Sequence
  Description of Artificial Sequence:  Hypothetical Probe Sequence
cctaaggaatacacggcacg

SEQ ID NO: 6576 - DNA, 20 bp, Artificial Sequence
  Description of Artificial Sequence:  Hypothetical Probe Sequence
atcgcctatgcgggtatcgt

SEQ ID NO: 6577 - DNA, 20 bp, Artificial Sequence
  Description of Artificial Sequence:  Hypothetical Probe Sequence
atcgcctacacggcttcgtt

SEQ ID NO: 6578 - DNA, 20 bp, Artificial Sequence
  Description of Artificial Sequence:  Hypothetical Probe Sequence
gatgttgagcaaagcctgcg

SEQ ID NO: 6579 - DNA, 20 bp, Artificial Sequence
  Description of Artificial Sequence:  Hypothetical Probe Sequence
gatgtcgtggacgaccagcc

SEQ ID NO: 6580 - DNA, 20 bp, Artificial Sequence
  Description of Artificial Sequence:  Hypothetical Probe Sequence
gatgctcaacggaatccgtt

SEQ ID NO: 6581 - DNA, 20 bp, Artificial Sequence
  Description of Artificial Sequence:  Hypothetical Probe Sequence
atcggatgctgtcgttacgg

SEQ ID NO: 6582 - DNA, 20 bp, Artificial Sequence
  Description of Artificial Sequence:  Hypothetical Probe Sequence
gatggtctgtgccagcggac

SEQ ID NO: 6583 - DNA, 20 bp, Artificial Sequence
  Description of Artificial Sequence:  Hypothetical Probe Sequence
atcggatgatcgaggaacgg

SEQ ID NO: 6584 - DNA, 20 bp, Artificial Sequence
  Description of Artificial Sequence:  Hypothetical Probe Sequence
gatgcctagtcttccccacg

SEQ ID NO: 6585 - DNA, 20 bp, Artificial Sequence
  Description of Artificial Sequence:  Hypothetical Probe Sequence
gatgtgcgcttgtgattgcg

SEQ ID NO: 6586 - DNA, 20 bp, Artificial Sequence
  Description of Artificial Sequence:  Hypothetical Probe Sequence
atcggatgcacgcttggctt

SEQ ID NO: 6587 - DNA, 20 bp, Artificial Sequence
  Description of Artificial Sequence:  Hypothetical Probe Sequence
atcggatgcagcttagtgcg

SEQ ID NO: 6588 - DNA, 20 bp, Artificial Sequence
  Description of Artificial Sequence:  Hypothetical Probe Sequence
atcggatgggacagcctgat

SEQ ID NO: 6589 - DNA, 20 bp, Artificial Sequence
  Description of Artificial Sequence:  Hypothetical Probe Sequence
atcggatgacggcttgtccc

SEQ ID NO: 6590 - DNA, 20 bp, Artificial Sequence
  Description of Artificial Sequence:  Hypothetical Probe Sequence
tccctgtccgaatgcgcacg

SEQ ID NO: 6591 - DNA, 20 bp, Artificial Sequence
  Description of Artificial Sequence:  Hypothetical Probe Sequence
tcccaggatcgtgcttagcc

SEQ ID NO: 6592 - DNA, 20 bp, Artificial Sequence
  Description of Artificial Sequence:  Hypothetical Probe Sequence
tcccgatgcctacgtttccc

SEQ ID NO: 6593 - DNA, 20 bp, Artificial Sequence
  Description of Artificial Sequence:  Hypothetical Probe Sequence
tgcgttgatgtccgttagcc

SEQ ID NO: 6594 - DNA, 20 bp, Artificial Sequence
  Description of Artificial Sequence:  Hypothetical Probe Sequence
tgcgttagtccctccccgtt

SEQ ID NO: 6595 - DNA, 20 bp, Artificial Sequence
  Description of Artificial Sequence:  Hypothetical Probe Sequence
atcgtgcgcttgcttgcacg

SEQ ID NO: 6596 - DNA, 20 bp, Artificial Sequence
  Description of Artificial Sequence:  Hypothetical Probe Sequence
atcgtgcgctcatgtctccc

SEQ ID NO: 6597 - DNA, 20 bp, Artificial Sequence
  Description of Artificial Sequence:  Hypothetical Probe Sequence
tgcgccatcctagcaaatcg

SEQ ID NO: 6598 - DNA, 20 bp, Artificial Sequence
  Description of Artificial Sequence:  Hypothetical Probe Sequence
tgcggcttccataatcgacc

SEQ ID NO: 6599 - DNA, 20 bp, Artificial Sequence
  Description of Artificial Sequence:  Hypothetical Probe Sequence
tgcggagtgctttcgtgacc

SEQ ID NO: 6600 - DNA, 20 bp, Artificial Sequence
  Description of Artificial Sequence:  Hypothetical Probe Sequence
tgcgtccccagcaaagagga

SEQ ID NO: 6601 - DNA, 20 bp, Artificial Sequence
  Description of Artificial Sequence:  Hypothetical Probe Sequence
tgcgcacgtacaagccacct

SEQ ID NO: 6602 - DNA, 20 bp, Artificial Sequence
  Description of Artificial Sequence:  Hypothetical Probe Sequence
tgcggtgcggtaccattcgt

SEQ ID NO: 6603 - DNA, 20 bp, Artificial Sequence
  Description of Artificial Sequence:  Hypothetical Probe Sequence
atcgcacgaaaggaccgctt

SEQ ID NO: 6604 - DNA, 20 bp, Artificial Sequence
  Description of Artificial Sequence:  Hypothetical Probe Sequence
cacgcttggtctacggacgg

SEQ ID NO: 6605 - DNA, 20 bp, Artificial Sequence
  Description of Artificial Sequence:  Hypothetical Probe Sequence
atcgcacgcgaagagtcgtt

SEQ ID NO: 6606 - DNA, 20 bp, Artificial Sequence
  Description of Artificial Sequence:  Hypothetical Probe Sequence
atcgcacggcttacctcacg

SEQ ID NO: 6607 - DNA, 20 bp, Artificial Sequence
  Description of Artificial Sequence:  Hypothetical Probe Sequence
cacgagtgttagtgcgcgtt

SEQ ID NO: 6608 - DNA, 20 bp, Artificial Sequence
  Description of Artificial Sequence:  Hypothetical Probe Sequence
atcgcacgacctgcaaagga

SEQ ID NO: 6609 - DNA, 20 bp, Artificial Sequence
  Description of Artificial Sequence:  Hypothetical Probe Sequence
atcgcacgtcccctcacgaa

SEQ ID NO: 6610 - DNA, 20 bp, Artificial Sequence
  Description of Artificial Sequence:  Hypothetical Probe Sequence
atcgcacgtgcgctcagtgc

SEQ ID NO: 6611 - DNA, 20 bp, Artificial Sequence
  Description of Artificial Sequence:  Hypothetical Probe Sequence
atcgcacgacggctgtgcaa

SEQ ID NO: 6612 - DNA, 20 bp, Artificial Sequence
  Description of Artificial Sequence:  Hypothetical Probe Sequence
atcgcacgagccatacgacc

SEQ ID NO: 6613 - DNA, 20 bp, Artificial Sequence
  Description of Artificial Sequence:  Hypothetical Probe Sequence
atcgcagcttagcgaagcaa

SEQ ID NO: 6614 - DNA, 20 bp, Artificial Sequence
  Description of Artificial Sequence:  Hypothetical Probe Sequence
cagctctgttgaggactgcg

SEQ ID NO: 6615 - DNA, 20 bp, Artificial Sequence
  Description of Artificial Sequence:  Hypothetical Probe Sequence
cagctgtcgagtgtgcgcaa

SEQ ID NO: 6616 - DNA, 20 bp, Artificial Sequence
  Description of Artificial Sequence:  Hypothetical Probe Sequence
cagctcgtcctacagcggac

SEQ ID NO: 6617 - DNA, 20 bp, Artificial Sequence
  Description of Artificial Sequence:  Hypothetical Probe Sequence
atcgcagcgtctcttgggac

SEQ ID NO: 6618 - DNA, 20 bp, Artificial Sequence
  Description of Artificial Sequence:  Hypothetical Probe Sequence
atcgcagcagtgtgtccgtt

SEQ ID NO: 6619 - DNA, 20 bp, Artificial Sequence
  Description of Artificial Sequence:  Hypothetical Probe Sequence
atcgcagcatcgatacgtgc

SEQ ID NO: 6620 - DNA, 20 bp, Artificial Sequence
  Description of Artificial Sequence:  Hypothetical Probe Sequence
atcgcagcggacatactgcg

SEQ ID NO: 6621 - DNA, 20 bp, Artificial Sequence
  Description of Artificial Sequence:  Hypothetical Probe Sequence
atcgcagcacggctcacgaa

SEQ ID NO: 6622 - DNA, 20 bp, Artificial Sequence
  Description of Artificial Sequence:  Hypothetical Probe Sequence
atcggacctacaagccgacc

SEQ ID NO: 6623 - DNA, 20 bp, Artificial Sequence
  Description of Artificial Sequence:  Hypothetical Probe Sequence
gacccgttccattctggtgc

SEQ ID NO: 6624 - DNA, 20 bp, Artificial Sequence
  Description of Artificial Sequence:  Hypothetical Probe Sequence
gaccgcaagatgtgtcgtgc

SEQ ID NO: 6625 - DNA, 20 bp, Artificial Sequence
  Description of Artificial Sequence:  Hypothetical Probe Sequence
atcggaccatcgagtggctt

SEQ ID NO: 6626 - DNA, 20 bp, Artificial Sequence
  Description of Artificial Sequence:  Hypothetical Probe Sequence
atcggacctgcgtgtcaatc

SEQ ID NO: 6627 - DNA, 20 bp, Artificial Sequence
  Description of Artificial Sequence:  Hypothetical Probe Sequence
atcggaccggacttgacgtt

SEQ ID NO: 6628 - DNA, 20 bp, Artificial Sequence
  Description of Artificial Sequence:  Hypothetical Probe Sequence
atcggaccacggccatagga

SEQ ID NO: 6629 - DNA, 20 bp, Artificial Sequence
  Description of Artificial Sequence:  Hypothetical Probe Sequence
gtgcttgatgatcagccgaa

SEQ ID NO: 6630 - DNA, 20 bp, Artificial Sequence
  Description of Artificial Sequence:  Hypothetical Probe Sequence
gtgctgtcacctacgggcaa

SEQ ID NO: 6631 - DNA, 20 bp, Artificial Sequence
  Description of Artificial Sequence:  Hypothetical Probe Sequence
atcggtgcctcacgaaccta

SEQ ID NO: 6632 - DNA, 20 bp, Artificial Sequence
  Description of Artificial Sequence:  Hypothetical Probe Sequence
atcggtgcggtagtctgacc

SEQ ID NO: 6633 - DNA, 20 bp, Artificial Sequence
  Description of Artificial Sequence:  Hypothetical Probe Sequence
atcggtgcgatgttaggcaa

SEQ ID NO: 6634 - DNA, 20 bp, Artificial Sequence
  Description of Artificial Sequence:  Hypothetical Probe Sequence
gtgccacgctgtggacgctt

SEQ ID NO: 6635 - DNA, 20 bp, Artificial Sequence
  Description of Artificial Sequence:  Hypothetical Probe Sequence
atcggtgcggacagtgcacg

SEQ ID NO: 6636 - DNA, 20 bp, Artificial Sequence
  Description of Artificial Sequence:  Hypothetical Probe Sequence
atcggtgcagccgagtcgtt

SEQ ID NO: 6637 - DNA, 20 bp, Artificial Sequence
  Description of Artificial Sequence:  Hypothetical Probe Sequence
atcgggacaaagacggctgt

SEQ ID NO: 6638 - DNA, 20 bp, Artificial Sequence
  Description of Artificial Sequence:  Hypothetical Probe Sequence
atcgggaccgttcctatccc

SEQ ID NO: 6639 - DNA, 20 bp, Artificial Sequence
  Description of Artificial Sequence:  Hypothetical Probe Sequence
atcgggaccgaagagtacgg

SEQ ID NO: 6640 - DNA, 20 bp, Artificial Sequence
  Description of Artificial Sequence:  Hypothetical Probe Sequence
atcgggacgcttgatgtcgt

SEQ ID NO: 6641 - DNA, 20 bp, Artificial Sequence
  Description of Artificial Sequence:  Hypothetical Probe Sequence
ggacggtaggtaaaagcacg

SEQ ID NO: 6642 - DNA, 20 bp, Artificial Sequence
  Description of Artificial Sequence:  Hypothetical Probe Sequence
ggacgagtaaagtccccacg

SEQ ID NO: 6643 - DNA, 20 bp, Artificial Sequence
  Description of Artificial Sequence:  Hypothetical Probe Sequence
ggacacctggtatccccgtt

SEQ ID NO: 6644 - DNA, 20 bp, Artificial Sequence
  Description of Artificial Sequence:  Hypothetical Probe Sequence
ggactcccttgacttggcaa

SEQ ID NO: 6645 - DNA, 20 bp, Artificial Sequence
  Description of Artificial Sequence:  Hypothetical Probe Sequence
atcgggacacggaggacgtt

SEQ ID NO: 6646 - DNA, 20 bp, Artificial Sequence
  Description of Artificial Sequence:  Hypothetical Probe Sequence
acggttgatctggtgctgcg

SEQ ID NO: 6647 - DNA, 20 bp, Artificial Sequence
  Description of Artificial Sequence:  Hypothetical Probe Sequence
acggatacacggagccgcaa

SEQ ID NO: 6648 - DNA, 20 bp, Artificial Sequence
  Description of Artificial Sequence:  Hypothetical Probe Sequence
acggtacaacgggaccggac

SEQ ID NO: 6649 - DNA, 20 bp, Artificial Sequence
  Description of Artificial Sequence:  Hypothetical Probe Sequence
acggcttgttagcttgcacg

SEQ ID NO: 6650 - DNA, 20 bp, Artificial Sequence
  Description of Artificial Sequence:  Hypothetical Probe Sequence
acggctgttgatcgttgcaa

SEQ ID NO: 6651 - DNA, 20 bp, Artificial Sequence
  Description of Artificial Sequence:  Hypothetical Probe Sequence
acggccattacaggtatgcg

SEQ ID NO: 6652 - DNA, 20 bp, Artificial Sequence
  Description of Artificial Sequence:  Hypothetical Probe Sequence
atcgacggatcgggtacgaa

SEQ ID NO: 6653 - DNA, 20 bp, Artificial Sequence
  Description of Artificial Sequence:  Hypothetical Probe Sequence
atcgacggaggacgaacgaa

SEQ ID NO: 6654 - DNA, 20 bp, Artificial Sequence
  Description of Artificial Sequence:  Hypothetical Probe Sequence
acgggatgagtgtcccggac

SEQ ID NO: 6655 - DNA, 20 bp, Artificial Sequence
  Description of Artificial Sequence:  Hypothetical Probe Sequence
acggacggaatccagccgaa

SEQ ID NO: 6656 - DNA, 20 bp, Artificial Sequence
  Description of Artificial Sequence:  Hypothetical Probe Sequence
acggagccccatacctcacg

SEQ ID NO: 6657 - DNA, 20 bp, Artificial Sequence
  Description of Artificial Sequence:  Hypothetical Probe Sequence
agcctgatggtaagcccgtt

SEQ ID NO: 6658 - DNA, 20 bp, Artificial Sequence
  Description of Artificial Sequence:  Hypothetical Probe Sequence
agccttaggaccgcttcacg

SEQ ID NO: 6659 - DNA, 20 bp, Artificial Sequence
  Description of Artificial Sequence:  Hypothetical Probe Sequence
agcctgtctcccatcgtccc

SEQ ID NO: 6660 - DNA, 20 bp, Artificial Sequence
  Description of Artificial Sequence:  Hypothetical Probe Sequence
agcccttgatcgacctcgtt

SEQ ID NO: 6661 - DNA, 20 bp, Artificial Sequence
  Description of Artificial Sequence:  Hypothetical Probe Sequence
agccctgtgtctacggcgtt

SEQ ID NO: 6662 - DNA, 20 bp, Artificial Sequence
  Description of Artificial Sequence:  Hypothetical Probe Sequence
atcgagccggtaacctgcaa

SEQ ID NO: 6663 - DNA, 20 bp, Artificial Sequence
  Description of Artificial Sequence:  Hypothetical Probe Sequence
agccgcaatgtcctgtcacg

SEQ ID NO: 6664 - DNA, 20 bp, Artificial Sequence
  Description of Artificial Sequence:  Hypothetical Probe Sequence
agccaggaggtatctgcgaa

SEQ ID NO: 6665 - DNA, 20 bp, Artificial Sequence
  Description of Artificial Sequence:  Hypothetical Probe Sequence
agcctccccgttttagtgcg

SEQ ID NO: 6666 - DNA, 20 bp, Artificial Sequence
  Description of Artificial Sequence:  Hypothetical Probe Sequence
atcgagccgaccttaggacc

SEQ ID NO: 6667 - DNA, 20 bp, Artificial Sequence
  Description of Artificial Sequence:  Hypothetical Probe Sequence
tgatcgaaccattcccgctt

SEQ ID NO: 6668 - DNA, 20 bp, Artificial Sequence
  Description of Artificial Sequence:  Hypothetical Probe Sequence
aggattaggcaatcccgcaa

SEQ ID NO: 6669 - DNA, 20 bp, Artificial Sequence
  Description of Artificial Sequence:  Hypothetical Probe Sequence
aatcgcaatctgacgggctt

SEQ ID NO: 6670 - DNA, 20 bp, Artificial Sequence
  Description of Artificial Sequence:  Hypothetical Probe Sequence
aatcggactcgtcagcgctt

SEQ ID NO: 6671 - DNA, 20 bp, Artificial Sequence
  Description of Artificial Sequence:  Hypothetical Probe Sequence
aaagccatccatgatgcacg

SEQ ID NO: 6672 - DNA, 20 bp, Artificial Sequence
  Description of Artificial Sequence:  Hypothetical Probe Sequence
aggaaaaggctttgcgcttg

SEQ ID NO: 6673 - DNA, 20 bp, Artificial Sequence
  Description of Artificial Sequence:  Hypothetical Probe Sequence
aaagtccctgatgtgcgtgc

SEQ ID NO: 6674 - DNA, 20 bp, Artificial Sequence
  Description of Artificial Sequence:  Hypothetical Probe Sequence
aaagcacgatcgaaaggcaa

SEQ ID NO: 6675 - DNA, 20 bp, Artificial Sequence
  Description of Artificial Sequence:  Hypothetical Probe Sequence
tctgcgttctgtcgtttgcg

SEQ ID NO: 6676 - DNA, 20 bp, Artificial Sequence
  Description of Artificial Sequence:  Hypothetical Probe Sequence
tctgcgaaacctcacgacgg

SEQ ID NO: 6677 - DNA, 20 bp, Artificial Sequence
  Description of Artificial Sequence:  Hypothetical Probe Sequence
tctgagccacggccatcgtt

SEQ ID NO: 6678 - DNA, 20 bp, Artificial Sequence
  Description of Artificial Sequence:  Hypothetical Probe Sequence
tgtccagctcgttgcgtgcg

SEQ ID NO: 6679 - DNA, 20 bp, Artificial Sequence
  Description of Artificial Sequence:  Hypothetical Probe Sequence
tcgtcgaaagcccttgcttg

SEQ ID NO: 6680 - DNA, 20 bp, Artificial Sequence
  Description of Artificial Sequence:  Hypothetical Probe Sequence
tcgtacggcagcgaccgatg

SEQ ID NO: 6681 - DNA, 20 bp, Artificial Sequence
  Description of Artificial Sequence:  Hypothetical Probe Sequence
aggacttggcttagccggac

SEQ ID NO: 6682 - DNA, 20 bp, Artificial Sequence
  Description of Artificial Sequence:  Hypothetical Probe Sequence
cttgggtatgtcgtgccgtt

SEQ ID NO: 6683 - DNA, 20 bp, Artificial Sequence
  Description of Artificial Sequence:  Hypothetical Probe Sequence
cttggcaatgattcccggac

SEQ ID NO: 6684 - DNA, 20 bp, Artificial Sequence
  Description of Artificial Sequence:  Hypothetical Probe Sequence
cgttatcgatcgtcccgtgc

SEQ ID NO: 6685 - DNA, 20 bp, Artificial Sequence
  Description of Artificial Sequence:  Hypothetical Probe Sequence
cgttcagcgagttgcgccta

SEQ ID NO: 6686 - DNA, 20 bp, Artificial Sequence
  Description of Artificial Sequence:  Hypothetical Probe Sequence
cgttgtgcatcgcgttgacc

SEQ ID NO: 6687 - DNA, 20 bp, Artificial Sequence
  Description of Artificial Sequence:  Hypothetical Probe Sequence
cgttggacgtgctccctccc

SEQ ID NO: 6688 - DNA, 20 bp, Artificial Sequence
  Description of Artificial Sequence:  Hypothetical Probe Sequence
ccatgcaatgtcagccggac

SEQ ID NO: 6689 - DNA, 20 bp, Artificial Sequence
  Description of Artificial Sequence:  Hypothetical Probe Sequence
ccatagtggcaaggacacgg

SEQ ID NO: 6690 - DNA, 20 bp, Artificial Sequence
  Description of Artificial Sequence:  Hypothetical Probe Sequence
ccatcagcaaagccatgcaa

SEQ ID NO: 6691 - DNA, 20 bp, Artificial Sequence
  Description of Artificial Sequence:  Hypothetical Probe Sequence
ccatgtgctcccacggcgtt

SEQ ID NO: 6692 - DNA, 20 bp, Artificial Sequence
  Description of Artificial Sequence:  Hypothetical Probe Sequence
cgaacgttttagcagcgacc

SEQ ID NO: 6693 - DNA, 20 bp, Artificial Sequence
  Description of Artificial Sequence:  Hypothetical Probe Sequence
cgaaaccttctgccatgcaa

SEQ ID NO: 6694 - DNA, 20 bp, Artificial Sequence
  Description of Artificial Sequence:  Hypothetical Probe Sequence
cgaaacggggtaaaagccat

SEQ ID NO: 6695 - DNA, 20 bp, Artificial Sequence
  Description of Artificial Sequence:  Hypothetical Probe Sequence
gctttctgagcccacgatcg

SEQ ID NO: 6696 - DNA, 20 bp, Artificial Sequence
  Description of Artificial Sequence:  Hypothetical Probe Sequence
gcaaggaccgaaccattgcg

SEQ ID NO: 6697 - DNA, 20 bp, Artificial Sequence
  Description of Artificial Sequence:  Hypothetical Probe Sequence
gcaaacggacctcagcggta

SEQ ID NO: 6698 - DNA, 20 bp, Artificial Sequence
  Description of Artificial Sequence:  Hypothetical Probe Sequence
agtgccatcgtttcccatcg

SEQ ID NO: 6699 - DNA, 20 bp, Artificial Sequence
  Description of Artificial Sequence:  Hypothetical Probe Sequence
agtgcctacacgcacgagcc

SEQ ID NO: 6700 - DNA, 20 bp, Artificial Sequence
  Description of Artificial Sequence:  Hypothetical Probe Sequence
agtgcagcatcgctcagcaa

SEQ ID NO: 6701 - DNA, 20 bp, Artificial Sequence
  Description of Artificial Sequence:  Hypothetical Probe Sequence
agtgagcccctaagccacgg

SEQ ID NO: 6702 - DNA, 20 bp, Artificial Sequence
  Description of Artificial Sequence:  Hypothetical Probe Sequence
acctcagcccatagccgctt

SEQ ID NO: 6703 - DNA, 20 bp, Artificial Sequence
  Description of Artificial Sequence:  Hypothetical Probe Sequence
acctgaccgcttggacgtgc

SEQ ID NO: 6704 - DNA, 20 bp, Artificial Sequence
  Description of Artificial Sequence:  Hypothetical Probe Sequence
atcgccatctgtgcttcgaa

SEQ ID NO: 6705 - DNA, 20 bp, Artificial Sequence
  Description of Artificial Sequence:  Hypothetical Probe Sequence
atcgaccttcccgtgcgctt

SEQ ID NO: 6706 - DNA, 20 bp, Artificial Sequence
  Description of Artificial Sequence:  Hypothetical Probe Sequence
atcgcagcggtagtgcccat

SEQ ID NO: 6707 - DNA, 20 bp, Artificial Sequence
  Description of Artificial Sequence:  Hypothetical Probe Sequence
aggacacgatcgacggcagc

SEQ ID NO: 6708 - DNA, 20 bp, Artificial Sequence
  Description of Artificial Sequence:  Hypothetical Probe Sequence
gatggcaaatcgcacgccat

SEQ ID NO: 6709 - DNA, 20 bp, Artificial Sequence
  Description of Artificial Sequence:  Hypothetical Probe Sequence
tccccttggtctagccgcaa

SEQ ID NO: 6710 - DNA, 20 bp, Artificial Sequence
  Description of Artificial Sequence:  Hypothetical Probe Sequence
tcccgagttcgtgatggctt

SEQ ID NO: 6711 - DNA, 20 bp, Artificial Sequence
  Description of Artificial Sequence:  Hypothetical Probe Sequence
tgcgcgttcttgctgtggac

SEQ ID NO: 6712 - DNA, 20 bp, Artificial Sequence
  Description of Artificial Sequence:  Hypothetical Probe Sequence
tgcgagtgcgttgcaacacg

SEQ ID NO: 6713 - DNA, 20 bp, Artificial Sequence
  Description of Artificial Sequence:  Hypothetical Probe Sequence
tgcgtgcgacggtacacgtt

SEQ ID NO: 6714 - DNA, 20 bp, Artificial Sequence
  Description of Artificial Sequence:  Hypothetical Probe Sequence
tgcggtgctacacagcgctt

SEQ ID NO: 6715 - DNA, 20 bp, Artificial Sequence
  Description of Artificial Sequence:  Hypothetical Probe Sequence
cacgatacgatgcagctgcg

SEQ ID NO: 6716 - DNA, 20 bp, Artificial Sequence
  Description of Artificial Sequence:  Hypothetical Probe Sequence
cacgggtattgaacggacgg

SEQ ID NO: 6717 - DNA, 20 bp, Artificial Sequence
  Description of Artificial Sequence:  Hypothetical Probe Sequence
cacgacctagcctctgtgcg

SEQ ID NO: 6718 - DNA, 20 bp, Artificial Sequence
  Description of Artificial Sequence:  Hypothetical Probe Sequence
cacgcctaaaagggacgctt

SEQ ID NO: 6719 - DNA, 20 bp, Artificial Sequence
  Description of Artificial Sequence:  Hypothetical Probe Sequence
cacgggacgtcttgcgtcgt

SEQ ID NO: 6720 - DNA, 20 bp, Artificial Sequence
  Description of Artificial Sequence:  Hypothetical Probe Sequence
cagcatcggtgcagtgcacg

SEQ ID NO: 6721 - DNA, 20 bp, Artificial Sequence
  Description of Artificial Sequence:  Hypothetical Probe Sequence
cagcaggatgcggatgtccc

SEQ ID NO: 6722 - DNA, 20 bp, Artificial Sequence
  Description of Artificial Sequence:  Hypothetical Probe Sequence
cagccctatgtccagccgaa

SEQ ID NO: 6723 - DNA, 20 bp, Artificial Sequence
  Description of Artificial Sequence:  Hypothetical Probe Sequence
cagccacgttagtccccgaa

SEQ ID NO: 6724 - DNA, 20 bp, Artificial Sequence
  Description of Artificial Sequence:  Hypothetical Probe Sequence
gtgcatacgaccatcggcaa

SEQ ID NO: 6725 - DNA, 20 bp, Artificial Sequence
  Description of Artificial Sequence:  Hypothetical Probe Sequence
gtgcaaagtgcggtgcgacc

SEQ ID NO: 6726 - DNA, 20 bp, Artificial Sequence
  Description of Artificial Sequence:  Hypothetical Probe Sequence
gtgcgtctaaagcagcgtgc

SEQ ID NO: 6727 - DNA, 20 bp, Artificial Sequence
  Description of Artificial Sequence:  Hypothetical Probe Sequence
gtgccctacagcagtggtgc

SEQ ID NO: 6728 - DNA, 20 bp, Artificial Sequence
  Description of Artificial Sequence:  Hypothetical Probe Sequence
gtgcgacctcgttgtcggac

SEQ ID NO: 6729 - DNA, 20 bp, Artificial Sequence
  Description of Artificial Sequence:  Hypothetical Probe Sequence
ggaccttgtcccgcaaacgg

SEQ ID NO: 6730 - DNA, 20 bp, Artificial Sequence
  Description of Artificial Sequence:  Hypothetical Probe Sequence
ggacccatggactcccctca

SEQ ID NO: 6731 - DNA, 20 bp, Artificial Sequence
  Description of Artificial Sequence:  Hypothetical Probe Sequence
ggacgatgacctcacgcgtt

SEQ ID NO: 6732 - DNA, 20 bp, Artificial Sequence
  Description of Artificial Sequence:  Hypothetical Probe Sequence
acggatcgcctaccatgcaa

SEQ ID NO: 6733 - DNA, 20 bp, Artificial Sequence
  Description of Artificial Sequence:  Hypothetical Probe Sequence
acggaggacacgctgtgacc

SEQ ID NO: 6734 - DNA, 20 bp, Artificial Sequence
  Description of Artificial Sequence:  Hypothetical Probe Sequence
acgggatggtctcagctccc

SEQ ID NO: 6735 - DNA, 20 bp, Artificial Sequence
  Description of Artificial Sequence:  Hypothetical Probe Sequence
agccaaaggagttcccccat

SEQ ID NO: 6736 - DNA, 20 bp, Artificial Sequence
  Description of Artificial Sequence:  Hypothetical Probe Sequence
agccctcaataccacgccat

SEQ ID NO: 6737 - DNA, 20 bp, Artificial Sequence
  Description of Artificial Sequence:  Hypothetical Probe Sequence
agccagtgcagcccatccat

SEQ ID NO: 6738 - DNA, 20 bp, Artificial Sequence
  Description of Artificial Sequence:  Hypothetical Probe Sequence
agcccacggcttttgacagc

SEQ ID NO: 6739 - DNA, 20 bp, Artificial Sequence
  Description of Artificial Sequence:  Hypothetical Probe Sequence
aggaagcccagccacgctgt

SEQ ID NO: 6740 - DNA, 20 bp, Artificial Sequence
  Description of Artificial Sequence:  Hypothetical Probe Sequence
agccgtgctgtcctcacacg

SEQ ID NO: 6741 - DNA, 20 bp, Artificial Sequence
  Description of Artificial Sequence:  Hypothetical Probe Sequence
ttgatgcggcaatcgtcgtt

SEQ ID NO: 6742 - DNA, 20 bp, Artificial Sequence
  Description of Artificial Sequence:  Hypothetical Probe Sequence
tgtcgcaatgtcgtgcgctt

SEQ ID NO: 6743 - DNA, 20 bp, Artificial Sequence
  Description of Artificial Sequence:  Hypothetical Probe Sequence
tgtcacgggaccgcaatgcg

SEQ ID NO: 6744 - DNA, 20 bp, Artificial Sequence
  Description of Artificial Sequence:  Hypothetical Probe Sequence
tcgttcgttgtctgcgcacg

SEQ ID NO: 6745 - DNA, 20 bp, Artificial Sequence
  Description of Artificial Sequence:  Hypothetical Probe Sequence
tcgtcacggtgccagctgcg

SEQ ID NO: 6746 - DNA, 20 bp, Artificial Sequence
  Description of Artificial Sequence:  Hypothetical Probe Sequence
cgttgaccgaccggactgcg

SEQ ID NO: 6747 - DNA, 20 bp, Artificial Sequence
  Description of Artificial Sequence:  Hypothetical Probe Sequence
ctgttgcgcacgacgggacc

SEQ ID NO: 6748 - DNA, 20 bp, Artificial Sequence
  Description of Artificial Sequence:  Hypothetical Probe Sequence
gcttgacctcccgtgccacg

SEQ ID NO: 6749 - DNA, 20 bp, Artificial Sequence
  Description of Artificial Sequence:  Hypothetical Probe Sequence
gcaagcaacacgcctacacg

SEQ ID NO: 6750 - DNA, 20 bp, Artificial Sequence
  Description of Artificial Sequence:  Hypothetical Probe Sequence
atcgccatagtgtccccacg

SEQ ID NO: 6751 - DNA, 20 bp, Artificial Sequence
  Description of Artificial Sequence:  Hypothetical Probe Sequence
tcccttgaagccacggctgt

SEQ ID NO: 6752 - DNA, 20 bp, Artificial Sequence
  Description of Artificial Sequence:  Hypothetical Probe Sequence
tcccctcagaccacggcgaa

SEQ ID NO: 6753 - DNA, 20 bp, Artificial Sequence
  Description of Artificial Sequence:  Hypothetical Probe Sequence
tccccacgtgatagccggta

SEQ ID NO: 6754 - DNA, 20 bp, Artificial Sequence
  Description of Artificial Sequence:  Hypothetical Probe Sequence
cacgtcgtagcccacgcgtt

SEQ ID NO: 6755 - DNA, 20 bp, Artificial Sequence
  Description of Artificial Sequence:  Hypothetical Probe Sequence
cacgctgtcgttgtgcgtgc

SEQ ID NO: 6756 - DNA, 20 bp, Artificial Sequence
  Description of Artificial Sequence:  Hypothetical Probe Sequence
cacgcagcagtgtgcgacct

SEQ ID NO: 6757 - DNA, 20 bp, Artificial Sequence
  Description of Artificial Sequence:  Hypothetical Probe Sequence
cagcgtcttcgtcagctgcg

SEQ ID NO: 6758 - DNA, 20 bp, Artificial Sequence
  Description of Artificial Sequence:  Hypothetical Probe Sequence
cagcgagtcacggcaaagcc

SEQ ID NO: 6759 - DNA, 20 bp, Artificial Sequence
  Description of Artificial Sequence:  Hypothetical Probe Sequence
gacccgaaccatccatacgg

SEQ ID NO: 6760 - DNA, 20 bp, Artificial Sequence
  Description of Artificial Sequence:  Hypothetical Probe Sequence
gtgcgtctcgttacgggacc

SEQ ID NO: 6761 - DNA, 20 bp, Artificial Sequence
  Description of Artificial Sequence:  Hypothetical Probe Sequence
gtgcacggttgagcaaatcg

SEQ ID NO: 6762 - DNA, 20 bp, Artificial Sequence
  Description of Artificial Sequence:  Hypothetical Probe Sequence
ggaccacgcagctcgtgcaa

SEQ ID NO: 6763 - DNA, 20 bp, Artificial Sequence
  Description of Artificial Sequence:  Hypothetical Probe Sequence
agccgagtagtggtgcgacc

SEQ ID NO: 6764 - DNA, 20 bp, Artificial Sequence
  Description of Artificial Sequence:  Hypothetical Probe Sequence
agccacctcttgtccctgcg

SEQ ID NO: 6765 - DNA, 20 bp, Artificial Sequence
  Description of Artificial Sequence:  Hypothetical Probe Sequence
ttgaagccgtgcgtgcggta

SEQ ID NO: 6766 - DNA, 20 bp, Artificial Sequence
  Description of Artificial Sequence:  Hypothetical Probe Sequence
aatcgtgcacggcgtttccc

SEQ ID NO: 6767 - DNA, 20 bp, Artificial Sequence
  Description of Artificial Sequence:  Hypothetical Probe Sequence
aatcacggtcgttccccacg

SEQ ID NO: 6768 - DNA, 20 bp, Artificial Sequence
  Description of Artificial Sequence:  Hypothetical Probe Sequence
aaagccatcagcggacgtgc

SEQ ID NO: 6769 - DNA, 20 bp, Artificial Sequence
  Description of Artificial Sequence:  Hypothetical Probe Sequence
aaagcgaaagccccatcgtt

SEQ ID NO: 6770 - DNA, 20 bp, Artificial Sequence
  Description of Artificial Sequence:  Hypothetical Probe Sequence
aaagcacgcagctgcgtgcg

SEQ ID NO: 6771 - DNA, 20 bp, Artificial Sequence
  Description of Artificial Sequence:  Hypothetical Probe Sequence
gatgcttgcgttccatgtgc

SEQ ID NO: 6772 - DNA, 20 bp, Artificial Sequence
  Description of Artificial Sequence:  Hypothetical Probe Sequence
cgtttgtccgaaagccacgg

SEQ ID NO: 6773 - DNA, 20 bp, Artificial Sequence
  Description of Artificial Sequence:  Hypothetical Probe Sequence
gatgcgttggacagccccta

SEQ ID NO: 6774 - DNA, 20 bp, Artificial Sequence
  Description of Artificial Sequence:  Hypothetical Probe Sequence
ctcacacgcgaacacggtgc

SEQ ID NO: 6775 - DNA, 20 bp, Artificial Sequence
  Description of Artificial Sequence:  Hypothetical Probe Sequence
ctgtcgaacctatgcggtgc

SEQ ID NO: 6776 - DNA, 20 bp, Artificial Sequence
  Description of Artificial Sequence:  Hypothetical Probe Sequence
ctgtcagccacggcttgtgc

SEQ ID NO: 6777 - DNA, 20 bp, Artificial Sequence
  Description of Artificial Sequence:  Hypothetical Probe Sequence
ctgtagccacgggcaacacg

SEQ ID NO: 6778 - DNA, 20 bp, Artificial Sequence
  Description of Artificial Sequence:  Hypothetical Probe Sequence
ccatcgtttcgtgcttggac

SEQ ID NO: 6779 - DNA, 20 bp, Artificial Sequence
  Description of Artificial Sequence:  Hypothetical Probe Sequence
gatgccatccatcagccgaa

SEQ ID NO: 6780 - DNA, 20 bp, Artificial Sequence
  Description of Artificial Sequence:  Hypothetical Probe Sequence
ccataggaggaccagccgaa

SEQ ID NO: 6781 - DNA, 20 bp, Artificial Sequence
  Description of Artificial Sequence:  Hypothetical Probe Sequence
ccatcctacgaaagccgacc

SEQ ID NO: 6782 - DNA, 20 bp, Artificial Sequence
  Description of Artificial Sequence:  Hypothetical Probe Sequence
ccattcccggtacagcccat

SEQ ID NO: 6783 - DNA, 20 bp, Artificial Sequence
  Description of Artificial Sequence:  Hypothetical Probe Sequence
cgaactcatgcgggactccc

SEQ ID NO: 6784 - DNA, 20 bp, Artificial Sequence
  Description of Artificial Sequence:  Hypothetical Probe Sequence
cgaaatcgcctacagcgctt

SEQ ID NO: 6785 - DNA, 20 bp, Artificial Sequence
  Description of Artificial Sequence:  Hypothetical Probe Sequence
cgaaacgggcaatgtccttg

SEQ ID NO: 6786 - DNA, 20 bp, Artificial Sequence
  Description of Artificial Sequence:  Hypothetical Probe Sequence
gatgcgaaagccgcttgcaa

SEQ ID NO: 6787 - DNA, 20 bp, Artificial Sequence
  Description of Artificial Sequence:  Hypothetical Probe Sequence
gcttcttgcacggaccgtgc

SEQ ID NO: 6788 - DNA, 20 bp, Artificial Sequence
  Description of Artificial Sequence:  Hypothetical Probe Sequence
gcttgcaaaggatcgtgcaa

SEQ ID NO: 6789 - DNA, 20 bp, Artificial Sequence
  Description of Artificial Sequence:  Hypothetical Probe Sequence
gcttgaccgtctcagctgcg

SEQ ID NO: 6790 - DNA, 20 bp, Artificial Sequence
  Description of Artificial Sequence:  Hypothetical Probe Sequence
gatgggtatgcgatcgcacg

SEQ ID NO: 6791 - DNA, 20 bp, Artificial Sequence
  Description of Artificial Sequence:  Hypothetical Probe Sequence
ggtagtgccacgtgcgcacg

SEQ ID NO: 6792 - DNA, 20 bp, Artificial Sequence
  Description of Artificial Sequence:  Hypothetical Probe Sequence
gagttcccggtagtgcgcaa

SEQ ID NO: 6793 - DNA, 20 bp, Artificial Sequence
  Description of Artificial Sequence:  Hypothetical Probe Sequence
gcaatctgcgaatcccagcc

SEQ ID NO: 6794 - DNA, 20 bp, Artificial Sequence
  Description of Artificial Sequence:  Hypothetical Probe Sequence
gcaacgttatacgcaatgcg

SEQ ID NO: 6795 - DNA, 20 bp, Artificial Sequence
  Description of Artificial Sequence:  Hypothetical Probe Sequence
gatggcaagcttcagcccta

SEQ ID NO: 6796 - DNA, 20 bp, Artificial Sequence
  Description of Artificial Sequence:  Hypothetical Probe Sequence
gcaaacctaaagcagccgaa

SEQ ID NO: 6797 - DNA, 20 bp, Artificial Sequence
  Description of Artificial Sequence:  Hypothetical Probe Sequence
gcaagatggaccagcccgaa

SEQ ID NO: 6798 - DNA, 20 bp, Artificial Sequence
  Description of Artificial Sequence:  Hypothetical Probe Sequence
agtggcaacgttcgtttccc

SEQ ID NO: 6799 - DNA, 20 bp, Artificial Sequence
  Description of Artificial Sequence:  Hypothetical Probe Sequence
accttgcgcgttgcttcgtt

SEQ ID NO: 6800 - DNA, 20 bp, Artificial Sequence
  Description of Artificial Sequence:  Hypothetical Probe Sequence
atcgcgttccatgcttacgg

SEQ ID NO: 6801 - DNA, 20 bp, Artificial Sequence
  Description of Artificial Sequence:  Hypothetical Probe Sequence
atcgccattgtccacgctca

SEQ ID NO: 6802 - DNA, 20 bp, Artificial Sequence
  Description of Artificial Sequence:  Hypothetical Probe Sequence
atcggcttccatggactgcg

SEQ ID NO: 6803 - DNA, 20 bp, Artificial Sequence
  Description of Artificial Sequence:  Hypothetical Probe Sequence
atcgcacggatgcgttcacg

SEQ ID NO: 6804 - DNA, 20 bp, Artificial Sequence
  Description of Artificial Sequence:  Hypothetical Probe Sequence
cctaagccggtagtgcggac

SEQ ID NO: 6805 - DNA, 20 bp, Artificial Sequence
  Description of Artificial Sequence:  Hypothetical Probe Sequence
gatgctcagacccgttcgaa

SEQ ID NO: 6806 - DNA, 20 bp, Artificial Sequence
  Description of Artificial Sequence:  Hypothetical Probe Sequence
gatgcctatgcgagcctgcg

SEQ ID NO: 6807 - DNA, 20 bp, Artificial Sequence
  Description of Artificial Sequence:  Hypothetical Probe Sequence
gatggtgctgatcacgcgaa

SEQ ID NO: 6808 - DNA, 20 bp, Artificial Sequence
  Description of Artificial Sequence:  Hypothetical Probe Sequence
gatgagccaatccagctccc

SEQ ID NO: 6809 - DNA, 20 bp, Artificial Sequence
  Description of Artificial Sequence:  Hypothetical Probe Sequence
tcccgcttaatccttgcgtt

SEQ ID NO: 6810 - DNA, 20 bp, Artificial Sequence
  Description of Artificial Sequence:  Hypothetical Probe Sequence
tcccgtctcgttgaccccat

SEQ ID NO: 6811 - DNA, 20 bp, Artificial Sequence
  Description of Artificial Sequence:  Hypothetical Probe Sequence
tccccagcgcttcacggtct

SEQ ID NO: 6812 - DNA, 20 bp, Artificial Sequence
  Description of Artificial Sequence:  Hypothetical Probe Sequence
tcccgaccatactcccgcaa

SEQ ID NO: 6813 - DNA, 20 bp, Artificial Sequence
  Description of Artificial Sequence:  Hypothetical Probe Sequence
tgcgttagcagcgatgatcg

SEQ ID NO: 6814 - DNA, 20 bp, Artificial Sequence
  Description of Artificial Sequence:  Hypothetical Probe Sequence
tgcgggtaatcggcttgatg

SEQ ID NO: 6815 - DNA, 20 bp, Artificial Sequence
  Description of Artificial Sequence:  Hypothetical Probe Sequence
tgcgcacgcgaatcgtagga

SEQ ID NO: 6816 - DNA, 20 bp, Artificial Sequence
  Description of Artificial Sequence:  Hypothetical Probe Sequence
tgcgcagcgcaaatcgacct

SEQ ID NO: 6817 - DNA, 20 bp, Artificial Sequence
  Description of Artificial Sequence:  Hypothetical Probe Sequence
cacgtgtcgtgcagccggac

SEQ ID NO: 6818 - DNA, 20 bp, Artificial Sequence
  Description of Artificial Sequence:  Hypothetical Probe Sequence
gatgcacgccatcgttcgtt

SEQ ID NO: 6819 - DNA, 20 bp, Artificial Sequence
  Description of Artificial Sequence:  Hypothetical Probe Sequence
cacgagtgacggatcggtgc

SEQ ID NO: 6820 - DNA, 20 bp, Artificial Sequence
  Description of Artificial Sequence:  Hypothetical Probe Sequence
cacgtgcggtctgacccagc

SEQ ID NO: 6821 - DNA, 20 bp, Artificial Sequence
  Description of Artificial Sequence:  Hypothetical Probe Sequence
gatgcacgcacgcttgatcg

SEQ ID NO: 6822 - DNA, 20 bp, Artificial Sequence
  Description of Artificial Sequence:  Hypothetical Probe Sequence
cacgagccgaccaatcacgg

SEQ ID NO: 6823 - DNA, 20 bp, Artificial Sequence
  Description of Artificial Sequence:  Hypothetical Probe Sequence
cagctgattgcgatcgggac

SEQ ID NO: 6824 - DNA, 20 bp, Artificial Sequence
  Description of Artificial Sequence:  Hypothetical Probe Sequence
cagctcgtcacgtcccatcg

SEQ ID NO: 6825 - DNA, 20 bp, Artificial Sequence
  Description of Artificial Sequence:  Hypothetical Probe Sequence
gatgcagccttgatcgcgaa

SEQ ID NO: 6826 - DNA, 20 bp, Artificial Sequence
  Description of Artificial Sequence:  Hypothetical Probe Sequence
cagcctcatgatgaccgctt

SEQ ID NO: 6827 - DNA, 20 bp, Artificial Sequence
  Description of Artificial Sequence:  Hypothetical Probe Sequence
gatgcagcggtaggtaacgg

SEQ ID NO: 6828 - DNA, 20 bp, Artificial Sequence
  Description of Artificial Sequence:  Hypothetical Probe Sequence
cagcgtgcgcttgtctcacg

SEQ ID NO: 6829 - DNA, 20 bp, Artificial Sequence
  Description of Artificial Sequence:  Hypothetical Probe Sequence
gatgcagcagccctcatccc

SEQ ID NO: 6830 - DNA, 20 bp, Artificial Sequence
  Description of Artificial Sequence:  Hypothetical Probe Sequence
gacccgttggacaaagcgaa

SEQ ID NO: 6831 - DNA, 20 bp, Artificial Sequence
  Description of Artificial Sequence:  Hypothetical Probe Sequence
gatggacccacgacggggta

SEQ ID NO: 6832 - DNA, 20 bp, Artificial Sequence
  Description of Artificial Sequence:  Hypothetical Probe Sequence
acggttgagctttgcggcaa

SEQ ID NO: 6833 - DNA, 20 bp, Artificial Sequence
  Description of Artificial Sequence:  Hypothetical Probe Sequence
acggggtagacccgaagcaa

SEQ ID NO: 6834 - DNA, 20 bp, Artificial Sequence
  Description of Artificial Sequence:  Hypothetical Probe Sequence
agccctcactcaagcctgcg

SEQ ID NO: 6835 - DNA, 20 bp, Artificial Sequence
  Description of Artificial Sequence:  Hypothetical Probe Sequence
gatgagccgtctacggcagc

SEQ ID NO: 6836 - DNA, 20 bp, Artificial Sequence
  Description of Artificial Sequence:  Hypothetical Probe Sequence
agccatcgtcgtccatgcaa

SEQ ID NO: 6837 - DNA, 20 bp, Artificial Sequence
  Description of Artificial Sequence:  Hypothetical Probe Sequence
agcccagcatacgcaacgtt

SEQ ID NO: 6838 - DNA, 20 bp, Artificial Sequence
  Description of Artificial Sequence:  Hypothetical Probe Sequence
ttgaaatctgcgagcccgtt

SEQ ID NO: 6839 - DNA, 20 bp, Artificial Sequence
  Description of Artificial Sequence:  Hypothetical Probe Sequence
tcccttgaaggaagcccttg

SEQ ID NO: 6840 - DNA, 20 bp, Artificial Sequence
  Description of Artificial Sequence:  Hypothetical Probe Sequence
ttgatgcgttagggtatgcg

SEQ ID NO: 6841 - DNA, 20 bp, Artificial Sequence
  Description of Artificial Sequence:  Hypothetical Probe Sequence
ttgacagcaaagatcgcacg

SEQ ID NO: 6842 - DNA, 20 bp, Artificial Sequence
  Description of Artificial Sequence:  Hypothetical Probe Sequence
ttgaggaccacggatgcacg

SEQ ID NO: 6843 - DNA, 20 bp, Artificial Sequence
  Description of Artificial Sequence:  Hypothetical Probe Sequence
tgattctgggaccagcagcc

SEQ ID NO: 6844 - DNA, 20 bp, Artificial Sequence
  Description of Artificial Sequence:  Hypothetical Probe Sequence
tgattcgtaatcacggcacg

SEQ ID NO: 6845 - DNA, 20 bp, Artificial Sequence
  Description of Artificial Sequence:  Hypothetical Probe Sequence
tgatcgaattgaagccagcc

SEQ ID NO: 6846 - DNA, 20 bp, Artificial Sequence
  Description of Artificial Sequence:  Hypothetical Probe Sequence
tccctgattgcgaggaccta

SEQ ID NO: 6847 - DNA, 20 bp, Artificial Sequence
  Description of Artificial Sequence:  Hypothetical Probe Sequence
tgatgacctgtcacggacgg

SEQ ID NO: 6848 - DNA, 20 bp, Artificial Sequence
  Description of Artificial Sequence:  Hypothetical Probe Sequence
ttagctgtatcgtgcgcgaa

SEQ ID NO: 6849 - DNA, 20 bp, Artificial Sequence
  Description of Artificial Sequence:  Hypothetical Probe Sequence
tcccttaggcaagcttgcaa

SEQ ID NO: 6850 - DNA, 20 bp, Artificial Sequence
  Description of Artificial Sequence:  Hypothetical Probe Sequence
ttagaggaaatctgcgtgcg

SEQ ID NO: 6851 - DNA, 20 bp, Artificial Sequence
  Description of Artificial Sequence:  Hypothetical Probe Sequence
tcccttagcacgcttgagga

SEQ ID NO: 6852 - DNA, 20 bp, Artificial Sequence
  Description of Artificial Sequence:  Hypothetical Probe Sequence
tcccaatcctgtggactccc

SEQ ID NO: 6853 - DNA, 20 bp, Artificial Sequence
  Description of Artificial Sequence:  Hypothetical Probe Sequence
tcccaatcgcttcctagacc

SEQ ID NO: 6854 - DNA, 20 bp, Artificial Sequence
  Description of Artificial Sequence:  Hypothetical Probe Sequence
tcccaatcgagtacctgacc

SEQ ID NO: 6855 - DNA, 20 bp, Artificial Sequence
  Description of Artificial Sequence:  Hypothetical Probe Sequence
tcccaatcagtggaccgacc

SEQ ID NO: 6856 - DNA, 20 bp, Artificial Sequence
  Description of Artificial Sequence:  Hypothetical Probe Sequence
tcccaatcacctcttgagcc

SEQ ID NO: 6857 - DNA, 20 bp, Artificial Sequence
  Description of Artificial Sequence:  Hypothetical Probe Sequence
tcccaatctcccagtgtgcg

SEQ ID NO: 6858 - DNA, 20 bp, Artificial Sequence
  Description of Artificial Sequence:  Hypothetical Probe Sequence
tcccaatcgacctctgcacg

SEQ ID NO: 6859 - DNA, 20 bp, Artificial Sequence
  Description of Artificial Sequence:  Hypothetical Probe Sequence
tcccaatcagccgatgcgtt

SEQ ID NO: 6860 - DNA, 20 bp, Artificial Sequence
  Description of Artificial Sequence:  Hypothetical Probe Sequence
tcccataccttggtgcacgg

SEQ ID NO: 6861 - DNA, 20 bp, Artificial Sequence
  Description of Artificial Sequence:  Hypothetical Probe Sequence
tcccatacccatcagccagc

SEQ ID NO: 6862 - DNA, 20 bp, Artificial Sequence
  Description of Artificial Sequence:  Hypothetical Probe Sequence
tcccataccgaaatacgtgc

SEQ ID NO: 6863 - DNA, 20 bp, Artificial Sequence
  Description of Artificial Sequence:  Hypothetical Probe Sequence
tcccatacgtgccgaactca

SEQ ID NO: 6864 - DNA, 20 bp, Artificial Sequence
  Description of Artificial Sequence:  Hypothetical Probe Sequence
tcccaaagcgtttcgtcgtt

SEQ ID NO: 6865 - DNA, 20 bp, Artificial Sequence
  Description of Artificial Sequence:  Hypothetical Probe Sequence
tcccaaagggtaccatcgtt

SEQ ID NO: 6866 - DNA, 20 bp, Artificial Sequence
  Description of Artificial Sequence:  Hypothetical Probe Sequence
tcccaaaggtctcgttcacg

SEQ ID NO: 6867 - DNA, 20 bp, Artificial Sequence
  Description of Artificial Sequence:  Hypothetical Probe Sequence
tcccaaagacctcacgatcg

SEQ ID NO: 6868 - DNA, 20 bp, Artificial Sequence
  Description of Artificial Sequence:  Hypothetical Probe Sequence
aaagatcgcgaattagcgaa

SEQ ID NO: 6869 - DNA, 20 bp, Artificial Sequence
  Description of Artificial Sequence:  Hypothetical Probe Sequence
aaaggatgacctcttgcgaa

SEQ ID NO: 6870 - DNA, 20 bp, Artificial Sequence
  Description of Artificial Sequence:  Hypothetical Probe Sequence
tcccaaagtgcgtgatccat

SEQ ID NO: 6871 - DNA, 20 bp, Artificial Sequence
  Description of Artificial Sequence:  Hypothetical Probe Sequence
aaagcagcaatctgtcgtgc

SEQ ID NO: 6872 - DNA, 20 bp, Artificial Sequence
  Description of Artificial Sequence:  Hypothetical Probe Sequence
tcccaaaggacctcgttcgt

SEQ ID NO: 6873 - DNA, 20 bp, Artificial Sequence
  Description of Artificial Sequence:  Hypothetical Probe Sequence
tcccaaagagcccttgacgg

SEQ ID NO: 6874 - DNA, 20 bp, Artificial Sequence
  Description of Artificial Sequence:  Hypothetical Probe Sequence
tccctctgcgtttccctcgt

SEQ ID NO: 6875 - DNA, 20 bp, Artificial Sequence
  Description of Artificial Sequence:  Hypothetical Probe Sequence
tctgctcacctaacggcgtt

SEQ ID NO: 6876 - DNA, 20 bp, Artificial Sequence
  Description of Artificial Sequence:  Hypothetical Probe Sequence
tccctctggtctgacccgaa

SEQ ID NO: 6877 - DNA, 20 bp, Artificial Sequence
  Description of Artificial Sequence:  Hypothetical Probe Sequence
tccctctgatcgcagcgcaa

SEQ ID NO: 6878 - DNA, 20 bp, Artificial Sequence
  Description of Artificial Sequence:  Hypothetical Probe Sequence
tctgaggacgttctgttgcg

SEQ ID NO: 6879 - DNA, 20 bp, Artificial Sequence
  Description of Artificial Sequence:  Hypothetical Probe Sequence
tctgtcccttgatgtcgcaa

SEQ ID NO: 6880 - DNA, 20 bp, Artificial Sequence
  Description of Artificial Sequence:  Hypothetical Probe Sequence
tccctctgggactgtcgacc

SEQ ID NO: 6881 - DNA, 20 bp, Artificial Sequence
  Description of Artificial Sequence:  Hypothetical Probe Sequence
tgtccttgcgtttctgacgg

SEQ ID NO: 6882 - DNA, 20 bp, Artificial Sequence
  Description of Artificial Sequence:  Hypothetical Probe Sequence
tgtcatcgaatcgtgcggac

SEQ ID NO: 6883 - DNA, 20 bp, Artificial Sequence
  Description of Artificial Sequence:  Hypothetical Probe Sequence
tgtcaggatgtcgacctgcg

SEQ ID NO: 6884 - DNA, 20 bp, Artificial Sequence
  Description of Artificial Sequence:  Hypothetical Probe Sequence
tgtcggactacatccccgtt

SEQ ID NO: 6885 - DNA, 20 bp, Artificial Sequence
  Description of Artificial Sequence:  Hypothetical Probe Sequence
tcgttgtcacctcagcagcc

SEQ ID NO: 6886 - DNA, 20 bp, Artificial Sequence
  Description of Artificial Sequence:  Hypothetical Probe Sequence
tcgtctcagacccagcgctt

SEQ ID NO: 6887 - DNA, 20 bp, Artificial Sequence
  Description of Artificial Sequence:  Hypothetical Probe Sequence
tcgtggtatacatgcgcagc

SEQ ID NO: 6888 - DNA, 20 bp, Artificial Sequence
  Description of Artificial Sequence:  Hypothetical Probe Sequence
tccctcgtgtcttgtcagcc

SEQ ID NO: 6889 - DNA, 20 bp, Artificial Sequence
  Description of Artificial Sequence:  Hypothetical Probe Sequence
tccctcgtgcaaagtggtgc

SEQ ID NO: 6890 - DNA, 20 bp, Artificial Sequence
  Description of Artificial Sequence:  Hypothetical Probe Sequence
tcgtacctcctagtgctgcg

SEQ ID NO: 6891 - DNA, 20 bp, Artificial Sequence
  Description of Artificial Sequence:  Hypothetical Probe Sequence
tccctcgtgatgcacgatcg

SEQ ID NO: 6892 - DNA, 20 bp, Artificial Sequence
  Description of Artificial Sequence:  Hypothetical Probe Sequence
tccctcgttgcgccatagga

SEQ ID NO: 6893 - DNA, 20 bp, Artificial Sequence
  Description of Artificial Sequence:  Hypothetical Probe Sequence
tccctcgtgacctcgtgcaa

SEQ ID NO: 6894 - DNA, 20 bp, Artificial Sequence
  Description of Artificial Sequence:  Hypothetical Probe Sequence
tccctcgtgtgcttagccat

SEQ ID NO: 6895 - DNA, 20 bp, Artificial Sequence
  Description of Artificial Sequence:  Hypothetical Probe Sequence
tcgtggacgcttagtgcgaa

SEQ ID NO: 6896 - DNA, 20 bp, Artificial Sequence
  Description of Artificial Sequence:  Hypothetical Probe Sequence
tccccttgtgattcgttgcg

SEQ ID NO: 6897 - DNA, 20 bp, Artificial Sequence
  Description of Artificial Sequence:  Hypothetical Probe Sequence
tccccttgaaagggtaacct

SEQ ID NO: 6898 - DNA, 20 bp, Artificial Sequence
  Description of Artificial Sequence:  Hypothetical Probe Sequence
tccccttgtctgacctagcc

SEQ ID NO: 6899 - DNA, 20 bp, Artificial Sequence
  Description of Artificial Sequence:  Hypothetical Probe Sequence
tccccttgctcaggactctg

SEQ ID NO: 6900 - DNA, 20 bp, Artificial Sequence
  Description of Artificial Sequence:  Hypothetical Probe Sequence
tccccttgggtaagtgtgcg

SEQ ID NO: 6901 - DNA, 20 bp, Artificial Sequence
  Description of Artificial Sequence:  Hypothetical Probe Sequence
tccccttgatcgtctgtccc

SEQ ID NO: 6902 - DNA, 20 bp, Artificial Sequence
  Description of Artificial Sequence:  Hypothetical Probe Sequence
tccccttgagccaggattga

SEQ ID NO: 6903 - DNA, 20 bp, Artificial Sequence
  Description of Artificial Sequence:  Hypothetical Probe Sequence
tccccgtttgatatcgtgat

SEQ ID NO: 6904 - DNA, 20 bp, Artificial Sequence
  Description of Artificial Sequence:  Hypothetical Probe Sequence
tccccgttatacgtgcgatg

SEQ ID NO: 6905 - DNA, 20 bp, Artificial Sequence
  Description of Artificial Sequence:  Hypothetical Probe Sequence
tccccgtttacattgacacg

SEQ ID NO: 6906 - DNA, 20 bp, Artificial Sequence
  Description of Artificial Sequence:  Hypothetical Probe Sequence
tccccgtttgtctgtcgacc

SEQ ID NO: 6907 - DNA, 20 bp, Artificial Sequence
  Description of Artificial Sequence:  Hypothetical Probe Sequence
tccccgtttcgtcagcatcg

SEQ ID NO: 6908 - DNA, 20 bp, Artificial Sequence
  Description of Artificial Sequence:  Hypothetical Probe Sequence
tccccgttcttggagtggta

SEQ ID NO: 6909 - DNA, 20 bp, Artificial Sequence
  Description of Artificial Sequence:  Hypothetical Probe Sequence
tccccgttctcaggtacacg

SEQ ID NO: 6910 - DNA, 20 bp, Artificial Sequence
  Description of Artificial Sequence:  Hypothetical Probe Sequence
tccccgttccatcacggatg

SEQ ID NO: 6911 - DNA, 20 bp, Artificial Sequence
  Description of Artificial Sequence:  Hypothetical Probe Sequence
tccccgttgctttcccctgt

SEQ ID NO: 6912 - DNA, 20 bp, Artificial Sequence
  Description of Artificial Sequence:  Hypothetical Probe Sequence
tccccgttgcaatctgacct

SEQ ID NO: 6913 - DNA, 20 bp, Artificial Sequence
  Description of Artificial Sequence:  Hypothetical Probe Sequence
tccccgttaccttgatacgg

SEQ ID NO: 6914 - DNA, 20 bp, Artificial Sequence
  Description of Artificial Sequence:  Hypothetical Probe Sequence
tccccgttatcgcctatccc

SEQ ID NO: 6915 - DNA, 20 bp, Artificial Sequence
  Description of Artificial Sequence:  Hypothetical Probe Sequence
tccccgtttgcgtcgtagga

SEQ ID NO: 6916 - DNA, 20 bp, Artificial Sequence
  Description of Artificial Sequence:  Hypothetical Probe Sequence
tccccgttgtgcagtgcgtt

SEQ ID NO: 6917 - DNA, 20 bp, Artificial Sequence
  Description of Artificial Sequence:  Hypothetical Probe Sequence
tcccctcatgattgcgacgg

SEQ ID NO: 6918 - DNA, 20 bp, Artificial Sequence
  Description of Artificial Sequence:  Hypothetical Probe Sequence
tcccctcattagcttgtgcg

SEQ ID NO: 6919 - DNA, 20 bp, Artificial Sequence
  Description of Artificial Sequence:  Hypothetical Probe Sequence
tcccctcatctggcttttag

SEQ ID NO: 6920 - DNA, 20 bp, Artificial Sequence
  Description of Artificial Sequence:  Hypothetical Probe Sequence
tcccctcaccatcctaagcc

SEQ ID NO: 6921 - DNA, 20 bp, Artificial Sequence
  Description of Artificial Sequence:  Hypothetical Probe Sequence
tcccctcagcttaggacgaa

SEQ ID NO: 6922 - DNA, 20 bp, Artificial Sequence
  Description of Artificial Sequence:  Hypothetical Probe Sequence
tcccctcaacctcctacacg

SEQ ID NO: 6923 - DNA, 20 bp, Artificial Sequence
  Description of Artificial Sequence:  Hypothetical Probe Sequence
tcccctcacacgatcgtcgt

SEQ ID NO: 6924 - DNA, 20 bp, Artificial Sequence
  Description of Artificial Sequence:  Hypothetical Probe Sequence
tcccctcacagcctgttccc

SEQ ID NO: 6925 - DNA, 20 bp, Artificial Sequence
  Description of Artificial Sequence:  Hypothetical Probe Sequence
tcccctgttgatgcttgacc

SEQ ID NO: 6926 - DNA, 20 bp, Artificial Sequence
  Description of Artificial Sequence:  Hypothetical Probe Sequence
tcccctgttctgccatgatg

SEQ ID NO: 6927 - DNA, 20 bp, Artificial Sequence
  Description of Artificial Sequence:  Hypothetical Probe Sequence
tcccctgttgtcgcaagacc

SEQ ID NO: 6928 - DNA, 20 bp, Artificial Sequence
  Description of Artificial Sequence:  Hypothetical Probe Sequence
tcccctgttcgtacctatcg

SEQ ID NO: 6929 - DNA, 20 bp, Artificial Sequence
  Description of Artificial Sequence:  Hypothetical Probe Sequence
tcccctgtcgaaaaagcgtt

SEQ ID NO: 6930 - DNA, 20 bp, Artificial Sequence
  Description of Artificial Sequence:  Hypothetical Probe Sequence
tcccctgtgcaaagtggacc

SEQ ID NO: 6931 - DNA, 20 bp, Artificial Sequence
  Description of Artificial Sequence:  Hypothetical Probe Sequence
tcccctgtaggatcccgcaa

SEQ ID NO: 6932 - DNA, 20 bp, Artificial Sequence
  Description of Artificial Sequence:  Hypothetical Probe Sequence
tcccctgtcctaagcctgcg

SEQ ID NO: 6933 - DNA, 20 bp, Artificial Sequence
  Description of Artificial Sequence:  Hypothetical Probe Sequence
tcccctgtgatgggacacgg

SEQ ID NO: 6934 - DNA, 20 bp, Artificial Sequence
  Description of Artificial Sequence:  Hypothetical Probe Sequence
tcccctgttgcgcttgtgtc

SEQ ID NO: 6935 - DNA, 20 bp, Artificial Sequence
  Description of Artificial Sequence:  Hypothetical Probe Sequence
tcccccatttgatcgtagtg

SEQ ID NO: 6936 - DNA, 20 bp, Artificial Sequence
  Description of Artificial Sequence:  Hypothetical Probe Sequence
tcccccatcttgtgcggatg

SEQ ID NO: 6937 - DNA, 20 bp, Artificial Sequence
  Description of Artificial Sequence:  Hypothetical Probe Sequence
tcccccatcgttgtctcgaa

SEQ ID NO: 6938 - DNA, 20 bp, Artificial Sequence
  Description of Artificial Sequence:  Hypothetical Probe Sequence
tcccccatctcagaccatcg

SEQ ID NO: 6939 - DNA, 20 bp, Artificial Sequence
  Description of Artificial Sequence:  Hypothetical Probe Sequence
tcccccatgcttcttgcgaa

SEQ ID NO: 6940 - DNA, 20 bp, Artificial Sequence
  Description of Artificial Sequence:  Hypothetical Probe Sequence
tcccccatggtattgaaaag

SEQ ID NO: 6941 - DNA, 20 bp, Artificial Sequence
  Description of Artificial Sequence:  Hypothetical Probe Sequence
tcccccatagtgagtgcgtt

SEQ ID NO: 6942 - DNA, 20 bp, Artificial Sequence
  Description of Artificial Sequence:  Hypothetical Probe Sequence
tcccccattgcgaatcagcc

SEQ ID NO: 6943 - DNA, 20 bp, Artificial Sequence
  Description of Artificial Sequence:  Hypothetical Probe Sequence
tcccccatgtgccagcttag

SEQ ID NO: 6944 - DNA, 20 bp, Artificial Sequence
  Description of Artificial Sequence:  Hypothetical Probe Sequence
tcccccatggacacctatac

SEQ ID NO: 6945 - DNA, 20 bp, Artificial Sequence
  Description of Artificial Sequence:  Hypothetical Probe Sequence
tccccgaaatacaatctccc

SEQ ID NO: 6946 - DNA, 20 bp, Artificial Sequence
  Description of Artificial Sequence:  Hypothetical Probe Sequence
tccccgaaaaaggcaaggta

SEQ ID NO: 6947 - DNA, 20 bp, Artificial Sequence
  Description of Artificial Sequence:  Hypothetical Probe Sequence
tccccgaatacaagtgcagc

SEQ ID NO: 6948 - DNA, 20 bp, Artificial Sequence
  Description of Artificial Sequence:  Hypothetical Probe Sequence
tccccgaacttggatgcagc

SEQ ID NO: 6949 - DNA, 20 bp, Artificial Sequence
  Description of Artificial Sequence:  Hypothetical Probe Sequence
tccccgaagcttttgaccat

SEQ ID NO: 6950 - DNA, 20 bp, Artificial Sequence
  Description of Artificial Sequence:  Hypothetical Probe Sequence
tccccgaagtctggtagtgc

SEQ ID NO: 6951 - DNA, 20 bp, Artificial Sequence
  Description of Artificial Sequence:  Hypothetical Probe Sequence
tccccgaaagtgggacggac

SEQ ID NO: 6952 - DNA, 20 bp, Artificial Sequence
  Description of Artificial Sequence:  Hypothetical Probe Sequence
tccccgaatgcgatcgttag

SEQ ID NO: 6953 - DNA, 20 bp, Artificial Sequence
  Description of Artificial Sequence:  Hypothetical Probe Sequence
tcccgcttttaggaccggac

SEQ ID NO: 6954 - DNA, 20 bp, Artificial Sequence
  Description of Artificial Sequence:  Hypothetical Probe Sequence
tcccgctttacactgtacgg

SEQ ID NO: 6955 - DNA, 20 bp, Artificial Sequence
  Description of Artificial Sequence:  Hypothetical Probe Sequence
tcccgcttcgaaatcgtctg

SEQ ID NO: 6956 - DNA, 20 bp, Artificial Sequence
  Description of Artificial Sequence:  Hypothetical Probe Sequence
tcccgcttgcttgtgcggta

SEQ ID NO: 6957 - DNA, 20 bp, Artificial Sequence
  Description of Artificial Sequence:  Hypothetical Probe Sequence
tcccgcttgtctaggacttg

SEQ ID NO: 6958 - DNA, 20 bp, Artificial Sequence
  Description of Artificial Sequence:  Hypothetical Probe Sequence
tcccgcttagtgcttggacc

SEQ ID NO: 6959 - DNA, 20 bp, Artificial Sequence
  Description of Artificial Sequence:  Hypothetical Probe Sequence
tcccgcttatcgagccttga

SEQ ID NO: 6960 - DNA, 20 bp, Artificial Sequence
  Description of Artificial Sequence:  Hypothetical Probe Sequence
tcccgcttcacgatcgccta

SEQ ID NO: 6961 - DNA, 20 bp, Artificial Sequence
  Description of Artificial Sequence:  Hypothetical Probe Sequence
tcccgcttcagcctcagatg

SEQ ID NO: 6962 - DNA, 20 bp, Artificial Sequence
  Description of Artificial Sequence:  Hypothetical Probe Sequence
tcccgcttagcctctggctt

SEQ ID NO: 6963 - DNA, 20 bp, Artificial Sequence
  Description of Artificial Sequence:  Hypothetical Probe Sequence
tcccggtatgatcgaagatg

SEQ ID NO: 6964 - DNA, 20 bp, Artificial Sequence
  Description of Artificial Sequence:  Hypothetical Probe Sequence
tcccggtaaatccacgggta

SEQ ID NO: 6965 - DNA, 20 bp, Artificial Sequence
  Description of Artificial Sequence:  Hypothetical Probe Sequence
tcccggtatgtccttggctt

SEQ ID NO: 6966 - DNA, 20 bp, Artificial Sequence
  Description of Artificial Sequence:  Hypothetical Probe Sequence
tcccggtactcaaatctgcg

SEQ ID NO: 6967 - DNA, 20 bp, Artificial Sequence
  Description of Artificial Sequence:  Hypothetical Probe Sequence
tcccggtactgtaggaacgg

SEQ ID NO: 6968 - DNA, 20 bp, Artificial Sequence
  Description of Artificial Sequence:  Hypothetical Probe Sequence
tcccggtaggtacctagtgc

SEQ ID NO: 6969 - DNA, 20 bp, Artificial Sequence
  Description of Artificial Sequence:  Hypothetical Probe Sequence
tcccggtaaggagcttcgtt

SEQ ID NO: 6970 - DNA, 20 bp, Artificial Sequence
  Description of Artificial Sequence:  Hypothetical Probe Sequence
tcccggtacctattagcagc

SEQ ID NO: 6971 - DNA, 20 bp, Artificial Sequence
  Description of Artificial Sequence:  Hypothetical Probe Sequence
tcccggtagatgtcgttctg

SEQ ID NO: 6972 - DNA, 20 bp, Artificial Sequence
  Description of Artificial Sequence:  Hypothetical Probe Sequence
tcccggtatgcgggtaagga

SEQ ID NO: 6973 - DNA, 20 bp, Artificial Sequence
  Description of Artificial Sequence:  Hypothetical Probe Sequence
tcccggtaagccccatctgt

SEQ ID NO: 6974 - DNA, 20 bp, Artificial Sequence
  Description of Artificial Sequence:  Hypothetical Probe Sequence
tcccgtctttgagcttgacc

SEQ ID NO: 6975 - DNA, 20 bp, Artificial Sequence
  Description of Artificial Sequence:  Hypothetical Probe Sequence
tcccgtcttgtcacggtgcg

SEQ ID NO: 6976 - DNA, 20 bp, Artificial Sequence
  Description of Artificial Sequence:  Hypothetical Probe Sequence
tcccgtcttcgtagtgcttg

SEQ ID NO: 6977 - DNA, 20 bp, Artificial Sequence
  Description of Artificial Sequence:  Hypothetical Probe Sequence
tcccgtctctcaaccttgcg

SEQ ID NO: 6978 - DNA, 20 bp, Artificial Sequence
  Description of Artificial Sequence:  Hypothetical Probe Sequence
tcccgtctagtgtcccagcc

SEQ ID NO: 6979 - DNA, 20 bp, Artificial Sequence
  Description of Artificial Sequence:  Hypothetical Probe Sequence
tcccgtctacctcctatgcg

SEQ ID NO: 6980 - DNA, 20 bp, Artificial Sequence
  Description of Artificial Sequence:  Hypothetical Probe Sequence
tcccgtctatcgctcatgcg

SEQ ID NO: 6981 - DNA, 20 bp, Artificial Sequence
  Description of Artificial Sequence:  Hypothetical Probe Sequence
tcccgtctcctaaggagacc

SEQ ID NO: 6982 - DNA, 20 bp, Artificial Sequence
  Description of Artificial Sequence:  Hypothetical Probe Sequence
tcccgtcttgcgccatgagt

SEQ ID NO: 6983 - DNA, 20 bp, Artificial Sequence
  Description of Artificial Sequence:  Hypothetical Probe Sequence
tcccgtctcacgaccttgtc

SEQ ID NO: 6984 - DNA, 20 bp, Artificial Sequence
  Description of Artificial Sequence:  Hypothetical Probe Sequence
tcccgtctggactctggctt

SEQ ID NO: 6985 - DNA, 20 bp, Artificial Sequence
  Description of Artificial Sequence:  Hypothetical Probe Sequence
tcccgtctacggcttgaatc

SEQ ID NO: 6986 - DNA, 20 bp, Artificial Sequence
  Description of Artificial Sequence:  Hypothetical Probe Sequence
tcccgtctagccgagtgacc

SEQ ID NO: 6987 - DNA, 20 bp, Artificial Sequence
  Description of Artificial Sequence:  Hypothetical Probe Sequence
tcccgagttgatccatcttg

SEQ ID NO: 6988 - DNA, 20 bp, Artificial Sequence
  Description of Artificial Sequence:  Hypothetical Probe Sequence
tcccgagtcttgatcggctt

SEQ ID NO: 6989 - DNA, 20 bp, Artificial Sequence
  Description of Artificial Sequence:  Hypothetical Probe Sequence
tcccgagtcgaagaccctca

SEQ ID NO: 6990 - DNA, 20 bp, Artificial Sequence
  Description of Artificial Sequence:  Hypothetical Probe Sequence
tcccgagtatcgtctgatcg

SEQ ID NO: 6991 - DNA, 20 bp, Artificial Sequence
  Description of Artificial Sequence:  Hypothetical Probe Sequence
tcccgagtcagcgaccacct

SEQ ID NO: 6992 - DNA, 20 bp, Artificial Sequence
  Description of Artificial Sequence:  Hypothetical Probe Sequence
tcccgagtgaccacgggctt

SEQ ID NO: 6993 - DNA, 20 bp, Artificial Sequence
  Description of Artificial Sequence:  Hypothetical Probe Sequence
tcccgagtgtgctgtcgatg

SEQ ID NO: 6994 - DNA, 20 bp, Artificial Sequence
  Description of Artificial Sequence:  Hypothetical Probe Sequence
tcccgagtacgggcaaagga

SEQ ID NO: 6995 - DNA, 20 bp, Artificial Sequence
  Description of Artificial Sequence:  Hypothetical Probe Sequence
tcccgcaattgacgttaaag

SEQ ID NO: 6996 - DNA, 20 bp, Artificial Sequence
  Description of Artificial Sequence:  Hypothetical Probe Sequence
tcccgcaattagccatccta

SEQ ID NO: 6997 - DNA, 20 bp, Artificial Sequence
  Description of Artificial Sequence:  Hypothetical Probe Sequence
tcccgcaaaatcggacaatc

SEQ ID NO: 6998 - DNA, 20 bp, Artificial Sequence
  Description of Artificial Sequence:  Hypothetical Probe Sequence
tcccgcaatacaatcgagtg

SEQ ID NO: 6999 - DNA, 20 bp, Artificial Sequence
  Description of Artificial Sequence:  Hypothetical Probe Sequence
tcccgcaacttgaaagatcg

SEQ ID NO: 7000 - DNA, 20 bp, Artificial Sequence
  Description of Artificial Sequence:  Hypothetical Probe Sequence
tcccgcaacgaagtgctgat

SEQ ID NO: 7001 - DNA, 20 bp, Artificial Sequence
  Description of Artificial Sequence:  Hypothetical Probe Sequence
tcccgcaagctttctggtgc

SEQ ID NO: 7002 - DNA, 20 bp, Artificial Sequence
  Description of Artificial Sequence:  Hypothetical Probe Sequence
tcccgcaagagtccatgcaa

SEQ ID NO: 7003 - DNA, 20 bp, Artificial Sequence
  Description of Artificial Sequence:  Hypothetical Probe Sequence
tcccgcaaagtgagtggatg

SEQ ID NO: 7004 - DNA, 20 bp, Artificial Sequence
  Description of Artificial Sequence:  Hypothetical Probe Sequence
tcccgcaacagcggacagga

SEQ ID NO: 7005 - DNA, 20 bp, Artificial Sequence
  Description of Artificial Sequence:  Hypothetical Probe Sequence
tcccgcaaggaccctacttg

SEQ ID NO: 7006 - DNA, 20 bp, Artificial Sequence
  Description of Artificial Sequence:  Hypothetical Probe Sequence
tcccgcaaagccggacatac

SEQ ID NO: 7007 - DNA, 20 bp, Artificial Sequence
  Description of Artificial Sequence:  Hypothetical Probe Sequence
tcccagtgctcagtgccgaa

SEQ ID NO: 7008 - DNA, 20 bp, Artificial Sequence
  Description of Artificial Sequence:  Hypothetical Probe Sequence
tcccagtgctgtatcgcacg

SEQ ID NO: 7009 - DNA, 20 bp, Artificial Sequence
  Description of Artificial Sequence:  Hypothetical Probe Sequence
tcccagtgccattcccgagt

SEQ ID NO: 7010 - DNA, 20 bp, Artificial Sequence
  Description of Artificial Sequence:  Hypothetical Probe Sequence
tcccagtggcaatcgtcgaa

SEQ ID NO: 7011 - DNA, 20 bp, Artificial Sequence
  Description of Artificial Sequence:  Hypothetical Probe Sequence
tcccagtgcctaggacgtct

SEQ ID NO: 7012 - DNA, 20 bp, Artificial Sequence
  Description of Artificial Sequence:  Hypothetical Probe Sequence
tcccagtgtccccctagtgc

SEQ ID NO: 7013 - DNA, 20 bp, Artificial Sequence
  Description of Artificial Sequence:  Hypothetical Probe Sequence
tcccagtgcagcgtctcgtt

SEQ ID NO: 7014 - DNA, 20 bp, Artificial Sequence
  Description of Artificial Sequence:  Hypothetical Probe Sequence
tcccagtgggacagtggctt

SEQ ID NO: 7015 - DNA, 20 bp, Artificial Sequence
  Description of Artificial Sequence:  Hypothetical Probe Sequence
tcccagtgagcccgtttcgt

SEQ ID NO: 7016 - DNA, 20 bp, Artificial Sequence
  Description of Artificial Sequence:  Hypothetical Probe Sequence
accttctgaatctccctgcg

SEQ ID NO: 7017 - DNA, 20 bp, Artificial Sequence
  Description of Artificial Sequence:  Hypothetical Probe Sequence
tcccaccttgtcatcggtgc

SEQ ID NO: 7018 - DNA, 20 bp, Artificial Sequence
  Description of Artificial Sequence:  Hypothetical Probe Sequence
tcccacctgcaacacgtgtc

SEQ ID NO: 7019 - DNA, 20 bp, Artificial Sequence
  Description of Artificial Sequence:  Hypothetical Probe Sequence
acctaggacagctctgcacg

SEQ ID NO: 7020 - DNA, 20 bp, Artificial Sequence
  Description of Artificial Sequence:  Hypothetical Probe Sequence
acctgatgcttgtcgttgcg

SEQ ID NO: 7021 - DNA, 20 bp, Artificial Sequence
  Description of Artificial Sequence:  Hypothetical Probe Sequence
tcccaccttccccacgctca

SEQ ID NO: 7022 - DNA, 20 bp, Artificial Sequence
  Description of Artificial Sequence:  Hypothetical Probe Sequence
tcccacctcagccttggagt

SEQ ID NO: 7023 - DNA, 20 bp, Artificial Sequence
  Description of Artificial Sequence:  Hypothetical Probe Sequence
tcccacctacggtcgtcgaa

SEQ ID NO: 7024 - DNA, 20 bp, Artificial Sequence
  Description of Artificial Sequence:  Hypothetical Probe Sequence
tcccatcgcgttgcttaaag

SEQ ID NO: 7025 - DNA, 20 bp, Artificial Sequence
  Description of Artificial Sequence:  Hypothetical Probe Sequence
tcccatcgccatcagcctca

SEQ ID NO: 7026 - DNA, 20 bp, Artificial Sequence
  Description of Artificial Sequence:  Hypothetical Probe Sequence
atcggatgttagaccttgcg

SEQ ID NO: 7027 - DNA, 20 bp, Artificial Sequence
  Description of Artificial Sequence:  Hypothetical Probe Sequence
tcccatcgtgcgaggaggta

SEQ ID NO: 7028 - DNA, 20 bp, Artificial Sequence
  Description of Artificial Sequence:  Hypothetical Probe Sequence
tcccatcgcacgtcgttccc

SEQ ID NO: 7029 - DNA, 20 bp, Artificial Sequence
  Description of Artificial Sequence:  Hypothetical Probe Sequence
tcccatcgcagccagcaatc

SEQ ID NO: 7030 - DNA, 20 bp, Artificial Sequence
  Description of Artificial Sequence:  Hypothetical Probe Sequence
tcccatcggaccttgacagc

SEQ ID NO: 7031 - DNA, 20 bp, Artificial Sequence
  Description of Artificial Sequence:  Hypothetical Probe Sequence
tcccatcgggacctcaatcg

SEQ ID NO: 7032 - DNA, 20 bp, Artificial Sequence
  Description of Artificial Sequence:  Hypothetical Probe Sequence
tcccatcgagccatcgccat

SEQ ID NO: 7033 - DNA, 20 bp, Artificial Sequence
  Description of Artificial Sequence:  Hypothetical Probe Sequence
tcccaggacttggtgcgtgc

SEQ ID NO: 7034 - DNA, 20 bp, Artificial Sequence
  Description of Artificial Sequence:  Hypothetical Probe Sequence
tcccaggagcttacggagcc

SEQ ID NO: 7035 - DNA, 20 bp, Artificial Sequence
  Description of Artificial Sequence:  Hypothetical Probe Sequence
aggaggtattagtgcgtgcg

SEQ ID NO: 7036 - DNA, 20 bp, Artificial Sequence
  Description of Artificial Sequence:  Hypothetical Probe Sequence
tcccaggagagtggactccc

SEQ ID NO: 7037 - DNA, 20 bp, Artificial Sequence
  Description of Artificial Sequence:  Hypothetical Probe Sequence
tcccaggaacctcgaagcaa

SEQ ID NO: 7038 - DNA, 20 bp, Artificial Sequence
  Description of Artificial Sequence:  Hypothetical Probe Sequence
tcccaggagatgtgcgtgcg

SEQ ID NO: 7039 - DNA, 20 bp, Artificial Sequence
  Description of Artificial Sequence:  Hypothetical Probe Sequence
tcccaggatccccctaagga

SEQ ID NO: 7040 - DNA, 20 bp, Artificial Sequence
  Description of Artificial Sequence:  Hypothetical Probe Sequence
tcccaggatgcgaatcgcaa

SEQ ID NO: 7041 - DNA, 20 bp, Artificial Sequence
  Description of Artificial Sequence:  Hypothetical Probe Sequence
tccccctatgatcgaaagcc

SEQ ID NO: 7042 - DNA, 20 bp, Artificial Sequence
  Description of Artificial Sequence:  Hypothetical Probe Sequence
tccccctacgttcctaatcg

SEQ ID NO: 7043 - DNA, 20 bp, Artificial Sequence
  Description of Artificial Sequence:  Hypothetical Probe Sequence
tccccctactcagtgcacgg

SEQ ID NO: 7044 - DNA, 20 bp, Artificial Sequence
  Description of Artificial Sequence:  Hypothetical Probe Sequence
tccccctagcttcacgggta

SEQ ID NO: 7045 - DNA, 20 bp, Artificial Sequence
  Description of Artificial Sequence:  Hypothetical Probe Sequence
tccccctaggtagagttgcg

SEQ ID NO: 7046 - DNA, 20 bp, Artificial Sequence
  Description of Artificial Sequence:  Hypothetical Probe Sequence
tccccctatgcggatgtgcg

SEQ ID NO: 7047 - DNA, 20 bp, Artificial Sequence
  Description of Artificial Sequence:  Hypothetical Probe Sequence
tccccctagaccatacacgg

SEQ ID NO: 7048 - DNA, 20 bp, Artificial Sequence
  Description of Artificial Sequence:  Hypothetical Probe Sequence
tccccctaggacaatcctca

SEQ ID NO: 7049 - DNA, 20 bp, Artificial Sequence
  Description of Artificial Sequence:  Hypothetical Probe Sequence
tccccctaacggctgtggac

SEQ ID NO: 7050 - DNA, 20 bp, Artificial Sequence
  Description of Artificial Sequence:  Hypothetical Probe Sequence
tcccgatgttgatcccccta

SEQ ID NO: 7051 - DNA, 20 bp, Artificial Sequence
  Description of Artificial Sequence:  Hypothetical Probe Sequence
tcccgatgttagctgtagcc

SEQ ID NO: 7052 - DNA, 20 bp, Artificial Sequence
  Description of Artificial Sequence:  Hypothetical Probe Sequence
tcccgatgtgtcacggtgtc

SEQ ID NO: 7053 - DNA, 20 bp, Artificial Sequence
  Description of Artificial Sequence:  Hypothetical Probe Sequence
tcccgatgctgtaaagggac

SEQ ID NO: 7054 - DNA, 20 bp, Artificial Sequence
  Description of Artificial Sequence:  Hypothetical Probe Sequence
tcccgatgggtaagtgtccc

SEQ ID NO: 7055 - DNA, 20 bp, Artificial Sequence
  Description of Artificial Sequence:  Hypothetical Probe Sequence
tcccgatggagttgtccttg

SEQ ID NO: 7056 - DNA, 20 bp, Artificial Sequence
  Description of Artificial Sequence:  Hypothetical Probe Sequence
tcccgatggcaagcaaaaag

SEQ ID NO: 7057 - DNA, 20 bp, Artificial Sequence
  Description of Artificial Sequence:  Hypothetical Probe Sequence
tcccgatgatcgggacagtg

SEQ ID NO: 7058 - DNA, 20 bp, Artificial Sequence
  Description of Artificial Sequence:  Hypothetical Probe Sequence
tcccgatgtgcgatacccat

SEQ ID NO: 7059 - DNA, 20 bp, Artificial Sequence
  Description of Artificial Sequence:  Hypothetical Probe Sequence
tcccgatgcacgggaccttg

SEQ ID NO: 7060 - DNA, 20 bp, Artificial Sequence
  Description of Artificial Sequence:  Hypothetical Probe Sequence
tcccgatggaccgcaacgtt

SEQ ID NO: 7061 - DNA, 20 bp, Artificial Sequence
  Description of Artificial Sequence:  Hypothetical Probe Sequence
tcccgatgggaccctacagc

SEQ ID NO: 7062 - DNA, 20 bp, Artificial Sequence
  Description of Artificial Sequence:  Hypothetical Probe Sequence
tcccgatgacggctcacttg

SEQ ID NO: 7063 - DNA, 20 bp, Artificial Sequence
  Description of Artificial Sequence:  Hypothetical Probe Sequence
tcccgatgagcctgcgttag

SEQ ID NO: 7064 - DNA, 20 bp, Artificial Sequence
  Description of Artificial Sequence:  Hypothetical Probe Sequence
tccctgatacctcagcgtgc

SEQ ID NO: 7065 - DNA, 20 bp, Artificial Sequence
  Description of Artificial Sequence:  Hypothetical Probe Sequence
tccctacagtgcgcaaacgg

SEQ ID NO: 7066 - DNA, 20 bp, Artificial Sequence
  Description of Artificial Sequence:  Hypothetical Probe Sequence
tccctccctgtccctacgaa

SEQ ID NO: 7067 - DNA, 20 bp, Artificial Sequence
  Description of Artificial Sequence:  Hypothetical Probe Sequence
tccccttgttagggacccat

SEQ ID NO: 7068 - DNA, 20 bp, Artificial Sequence
  Description of Artificial Sequence:  Hypothetical Probe Sequence
tccctcccctcacgttccat

SEQ ID NO: 7069 - DNA, 20 bp, Artificial Sequence
  Description of Artificial Sequence:  Hypothetical Probe Sequence
tccctcccctgtgtgcgagt

SEQ ID NO: 7070 - DNA, 20 bp, Artificial Sequence
  Description of Artificial Sequence:  Hypothetical Probe Sequence
tccccgaattagctgttgcg

SEQ ID NO: 7071 - DNA, 20 bp, Artificial Sequence
  Description of Artificial Sequence:  Hypothetical Probe Sequence
tccctcccatcgcctaatcg

SEQ ID NO: 7072 - DNA, 20 bp, Artificial Sequence
  Description of Artificial Sequence:  Hypothetical Probe Sequence
tccctcccaggattgaacgg

SEQ ID NO: 7073 - DNA, 20 bp, Artificial Sequence
  Description of Artificial Sequence:  Hypothetical Probe Sequence
tccctcccgatgaaagacct

SEQ ID NO: 7074 - DNA, 20 bp, Artificial Sequence
  Description of Artificial Sequence:  Hypothetical Probe Sequence
tccctcccacggaatcagga

SEQ ID NO: 7075 - DNA, 20 bp, Artificial Sequence
  Description of Artificial Sequence:  Hypothetical Probe Sequence
tccctgcgtgatagtggcaa

SEQ ID NO: 7076 - DNA, 20 bp, Artificial Sequence
  Description of Artificial Sequence:  Hypothetical Probe Sequence
tgcgatacgtgcaatcgcaa

SEQ ID NO: 7077 - DNA, 20 bp, Artificial Sequence
  Description of Artificial Sequence:  Hypothetical Probe Sequence
tccctgcgaaagagtgcgaa

SEQ ID NO: 7078 - DNA, 20 bp, Artificial Sequence
  Description of Artificial Sequence:  Hypothetical Probe Sequence
tgcgtacaccatatcgtgcg

SEQ ID NO: 7079 - DNA, 20 bp, Artificial Sequence
  Description of Artificial Sequence:  Hypothetical Probe Sequence
tgcgtgtcagtgcttggtgc

SEQ ID NO: 7080 - DNA, 20 bp, Artificial Sequence
  Description of Artificial Sequence:  Hypothetical Probe Sequence
tgcgcttgaggaataccgtt

SEQ ID NO: 7081 - DNA, 20 bp, Artificial Sequence
  Description of Artificial Sequence:  Hypothetical Probe Sequence
tgcgcgaacacgtgatcacg

SEQ ID NO: 7082 - DNA, 20 bp, Artificial Sequence
  Description of Artificial Sequence:  Hypothetical Probe Sequence
tgcggcttttgaagtgagcc

SEQ ID NO: 7083 - DNA, 20 bp, Artificial Sequence
  Description of Artificial Sequence:  Hypothetical Probe Sequence
tccctgcggcaacgttgtct

SEQ ID NO: 7084 - DNA, 20 bp, Artificial Sequence
  Description of Artificial Sequence:  Hypothetical Probe Sequence
tccctgcgacctgcaaatcg

SEQ ID NO: 7085 - DNA, 20 bp, Artificial Sequence
  Description of Artificial Sequence:  Hypothetical Probe Sequence
tgcgaggagagtgtgcggac

SEQ ID NO: 7086 - DNA, 20 bp, Artificial Sequence
  Description of Artificial Sequence:  Hypothetical Probe Sequence
tccctgcgtcccgagtgcaa

SEQ ID NO: 7087 - DNA, 20 bp, Artificial Sequence
  Description of Artificial Sequence:  Hypothetical Probe Sequence
tccctgcgcacgggtacgtt

SEQ ID NO: 7088 - DNA, 20 bp, Artificial Sequence
  Description of Artificial Sequence:  Hypothetical Probe Sequence
tccctgcgcagcctgtagga

SEQ ID NO: 7089 - DNA, 20 bp, Artificial Sequence
  Description of Artificial Sequence:  Hypothetical Probe Sequence
tccctgcggaccctgtcagc

SEQ ID NO: 7090 - DNA, 20 bp, Artificial Sequence
  Description of Artificial Sequence:  Hypothetical Probe Sequence
tccctgcggtgcgcttgcaa

SEQ ID NO: 7091 - DNA, 20 bp, Artificial Sequence
  Description of Artificial Sequence:  Hypothetical Probe Sequence
tccccacgttgacagctccc

SEQ ID NO: 7092 - DNA, 20 bp, Artificial Sequence
  Description of Artificial Sequence:  Hypothetical Probe Sequence
tccccacgttagtcgtcttg

SEQ ID NO: 7093 - DNA, 20 bp, Artificial Sequence
  Description of Artificial Sequence:  Hypothetical Probe Sequence
tccccacgtctgggacacgg

SEQ ID NO: 7094 - DNA, 20 bp, Artificial Sequence
  Description of Artificial Sequence:  Hypothetical Probe Sequence
tccccacgtcgtgtgcatac

SEQ ID NO: 7095 - DNA, 20 bp, Artificial Sequence
  Description of Artificial Sequence:  Hypothetical Probe Sequence
tccccacgctgttctgagcc

SEQ ID NO: 7096 - DNA, 20 bp, Artificial Sequence
  Description of Artificial Sequence:  Hypothetical Probe Sequence
tccccacgggtatcccctgt

SEQ ID NO: 7097 - DNA, 20 bp, Artificial Sequence
  Description of Artificial Sequence:  Hypothetical Probe Sequence
tccccacggtctcagcatcg

SEQ ID NO: 7098 - DNA, 20 bp, Artificial Sequence
  Description of Artificial Sequence:  Hypothetical Probe Sequence
tccccacggcaaaatcgtgc

SEQ ID NO: 7099 - DNA, 20 bp, Artificial Sequence
  Description of Artificial Sequence:  Hypothetical Probe Sequence
tccccacgacctaatcgatg

SEQ ID NO: 7100 - DNA, 20 bp, Artificial Sequence
  Description of Artificial Sequence:  Hypothetical Probe Sequence
tccccacgatcgcgaatgat

SEQ ID NO: 7101 - DNA, 20 bp, Artificial Sequence
  Description of Artificial Sequence:  Hypothetical Probe Sequence
tccccacgcctagtgcagcc

SEQ ID NO: 7102 - DNA, 20 bp, Artificial Sequence
  Description of Artificial Sequence:  Hypothetical Probe Sequence
tccccacgtgcgtgattcgt

SEQ ID NO: 7103 - DNA, 20 bp, Artificial Sequence
  Description of Artificial Sequence:  Hypothetical Probe Sequence
tccccacgcagccgttcttg

SEQ ID NO: 7104 - DNA, 20 bp, Artificial Sequence
  Description of Artificial Sequence:  Hypothetical Probe Sequence
tccccacggaccagcctaca

SEQ ID NO: 7105 - DNA, 20 bp, Artificial Sequence
  Description of Artificial Sequence:  Hypothetical Probe Sequence
tccccacggtgctgtctgcg

SEQ ID NO: 7106 - DNA, 20 bp, Artificial Sequence
  Description of Artificial Sequence:  Hypothetical Probe Sequence
tccccacgggacccatcgtt

SEQ ID NO: 7107 - DNA, 20 bp, Artificial Sequence
  Description of Artificial Sequence:  Hypothetical Probe Sequence
tccccagcttgaaaaggacc

SEQ ID NO: 7108 - DNA, 20 bp, Artificial Sequence
  Description of Artificial Sequence:  Hypothetical Probe Sequence
tccccagcaatcggacggta

SEQ ID NO: 7109 - DNA, 20 bp, Artificial Sequence
  Description of Artificial Sequence:  Hypothetical Probe Sequence
tccccagctacagcaaaaag

SEQ ID NO: 7110 - DNA, 20 bp, Artificial Sequence
  Description of Artificial Sequence:  Hypothetical Probe Sequence
tccccagctctgatcggtct

SEQ ID NO: 7111 - DNA, 20 bp, Artificial Sequence
  Description of Artificial Sequence:  Hypothetical Probe Sequence
tccccagctcgtctgtgatg

SEQ ID NO: 7112 - DNA, 20 bp, Artificial Sequence
  Description of Artificial Sequence:  Hypothetical Probe Sequence
tccccagccttgctgtatcg

SEQ ID NO: 7113 - DNA, 20 bp, Artificial Sequence
  Description of Artificial Sequence:  Hypothetical Probe Sequence
tccccagccgaagtgcctca

SEQ ID NO: 7114 - DNA, 20 bp, Artificial Sequence
  Description of Artificial Sequence:  Hypothetical Probe Sequence
tccccagcggtaaggacagc

SEQ ID NO: 7115 - DNA, 20 bp, Artificial Sequence
  Description of Artificial Sequence:  Hypothetical Probe Sequence
tccccagcacctaatcacgg

SEQ ID NO: 7116 - DNA, 20 bp, Artificial Sequence
  Description of Artificial Sequence:  Hypothetical Probe Sequence
tccccagcatcggatgcttg

SEQ ID NO: 7117 - DNA, 20 bp, Artificial Sequence
  Description of Artificial Sequence:  Hypothetical Probe Sequence
tccccagcaggagagtagcc

SEQ ID NO: 7118 - DNA, 20 bp, Artificial Sequence
  Description of Artificial Sequence:  Hypothetical Probe Sequence
tccccagccagctctgtgtc

SEQ ID NO: 7119 - DNA, 20 bp, Artificial Sequence
  Description of Artificial Sequence:  Hypothetical Probe Sequence
tccccagcggaccgaatgtc

SEQ ID NO: 7120 - DNA, 20 bp, Artificial Sequence
  Description of Artificial Sequence:  Hypothetical Probe Sequence
tccccagcagccggtagctt

SEQ ID NO: 7121 - DNA, 20 bp, Artificial Sequence
  Description of Artificial Sequence:  Hypothetical Probe Sequence
tcccgacctgattgattgtc

SEQ ID NO: 7122 - DNA, 20 bp, Artificial Sequence
  Description of Artificial Sequence:  Hypothetical Probe Sequence
tcccgaccttagaatcgtgc

SEQ ID NO: 7123 - DNA, 20 bp, Artificial Sequence
  Description of Artificial Sequence:  Hypothetical Probe Sequence
tcccgaccaatcttgagacc

SEQ ID NO: 7124 - DNA, 20 bp, Artificial Sequence
  Description of Artificial Sequence:  Hypothetical Probe Sequence
tcccgacctacattgaacgg

SEQ ID NO: 7125 - DNA, 20 bp, Artificial Sequence
  Description of Artificial Sequence:  Hypothetical Probe Sequence
tcccgacctgtctcccgagt

SEQ ID NO: 7126 - DNA, 20 bp, Artificial Sequence
  Description of Artificial Sequence:  Hypothetical Probe Sequence
tcccgacccgttttagcgtt

SEQ ID NO: 7127 - DNA, 20 bp, Artificial Sequence
  Description of Artificial Sequence:  Hypothetical Probe Sequence
tcccgaccctcaggtagcaa

SEQ ID NO: 7128 - DNA, 20 bp, Artificial Sequence
  Description of Artificial Sequence:  Hypothetical Probe Sequence
tcccgaccctgtaggacttg

SEQ ID NO: 7129 - DNA, 20 bp, Artificial Sequence
  Description of Artificial Sequence:  Hypothetical Probe Sequence
tcccgaccgtctaaaggacc

SEQ ID NO: 7130 - DNA, 20 bp, Artificial Sequence
  Description of Artificial Sequence:  Hypothetical Probe Sequence
tcccgaccgagtgtcttgcg

SEQ ID NO: 7131 - DNA, 20 bp, Artificial Sequence
  Description of Artificial Sequence:  Hypothetical Probe Sequence
tcccgaccgcaaaggagatg

SEQ ID NO: 7132 - DNA, 20 bp, Artificial Sequence
  Description of Artificial Sequence:  Hypothetical Probe Sequence
tcccgacccctaatacgatg

SEQ ID NO: 7133 - DNA, 20 bp, Artificial Sequence
  Description of Artificial Sequence:  Hypothetical Probe Sequence
tcccgacccacggtgcagcc

SEQ ID NO: 7134 - DNA, 20 bp, Artificial Sequence
  Description of Artificial Sequence:  Hypothetical Probe Sequence
tcccgtgcttgatctgagtg

SEQ ID NO: 7135 - DNA, 20 bp, Artificial Sequence
  Description of Artificial Sequence:  Hypothetical Probe Sequence
tcccgtgcttagtgatagcc

SEQ ID NO: 7136 - DNA, 20 bp, Artificial Sequence
  Description of Artificial Sequence:  Hypothetical Probe Sequence
tcccgtgctgtcccatcgtt

SEQ ID NO: 7137 - DNA, 20 bp, Artificial Sequence
  Description of Artificial Sequence:  Hypothetical Probe Sequence
tcccgtgcctcaaatcgtgc

SEQ ID NO: 7138 - DNA, 20 bp, Artificial Sequence
  Description of Artificial Sequence:  Hypothetical Probe Sequence
tcccgtgccgaacgaactca

SEQ ID NO: 7139 - DNA, 20 bp, Artificial Sequence
  Description of Artificial Sequence:  Hypothetical Probe Sequence
tcccgtgcgtctctgtacgg

SEQ ID NO: 7140 - DNA, 20 bp, Artificial Sequence
  Description of Artificial Sequence:  Hypothetical Probe Sequence
tcccgtgcacctgtctgatg

SEQ ID NO: 7141 - DNA, 20 bp, Artificial Sequence
  Description of Artificial Sequence:  Hypothetical Probe Sequence
tcccgtgctcccgcttgtgc

SEQ ID NO: 7142 - DNA, 20 bp, Artificial Sequence
  Description of Artificial Sequence:  Hypothetical Probe Sequence
tcccgtgcgaccttgaagtg

SEQ ID NO: 7143 - DNA, 20 bp, Artificial Sequence
  Description of Artificial Sequence:  Hypothetical Probe Sequence
tcccgtgcgtgcttaggtgc

SEQ ID NO: 7144 - DNA, 20 bp, Artificial Sequence
  Description of Artificial Sequence:  Hypothetical Probe Sequence
tcccgtgcacggaaagccta

SEQ ID NO: 7145 - DNA, 20 bp, Artificial Sequence
  Description of Artificial Sequence:  Hypothetical Probe Sequence
tcccgtgcagccaggattag

SEQ ID NO: 7146 - DNA, 20 bp, Artificial Sequence
  Description of Artificial Sequence:  Hypothetical Probe Sequence
tcccggacaatcatcgagga

SEQ ID NO: 7147 - DNA, 20 bp, Artificial Sequence
  Description of Artificial Sequence:  Hypothetical Probe Sequence
tcccggacatactgtcggac

SEQ ID NO: 7148 - DNA, 20 bp, Artificial Sequence
  Description of Artificial Sequence:  Hypothetical Probe Sequence
tcccggacaaagtcccttag

SEQ ID NO: 7149 - DNA, 20 bp, Artificial Sequence
  Description of Artificial Sequence:  Hypothetical Probe Sequence
tcccggactacacttgacgg

SEQ ID NO: 7150 - DNA, 20 bp, Artificial Sequence
  Description of Artificial Sequence:  Hypothetical Probe Sequence
tcccggactcgtcgaagacc

SEQ ID NO: 7151 - DNA, 20 bp, Artificial Sequence
  Description of Artificial Sequence:  Hypothetical Probe Sequence
tcccggaccttgccatctca

SEQ ID NO: 7152 - DNA, 20 bp, Artificial Sequence
  Description of Artificial Sequence:  Hypothetical Probe Sequence
tcccggaccgttcacgctca

SEQ ID NO: 7153 - DNA, 20 bp, Artificial Sequence
  Description of Artificial Sequence:  Hypothetical Probe Sequence
tcccggacgtctatactccc

SEQ ID NO: 7154 - DNA, 20 bp, Artificial Sequence
  Description of Artificial Sequence:  Hypothetical Probe Sequence
tcccggacatcggagtctca

SEQ ID NO: 7155 - DNA, 20 bp, Artificial Sequence
  Description of Artificial Sequence:  Hypothetical Probe Sequence
tcccggacgatgccatatcg

SEQ ID NO: 7156 - DNA, 20 bp, Artificial Sequence
  Description of Artificial Sequence:  Hypothetical Probe Sequence
tcccggactgcgaatcccta

SEQ ID NO: 7157 - DNA, 20 bp, Artificial Sequence
  Description of Artificial Sequence:  Hypothetical Probe Sequence
tcccggaccacgttgacgaa

SEQ ID NO: 7158 - DNA, 20 bp, Artificial Sequence
  Description of Artificial Sequence:  Hypothetical Probe Sequence
tcccggacgaccggacaaag

SEQ ID NO: 7159 - DNA, 20 bp, Artificial Sequence
  Description of Artificial Sequence:  Hypothetical Probe Sequence
tcccggacgtgcaaagtctg

SEQ ID NO: 7160 - DNA, 20 bp, Artificial Sequence
  Description of Artificial Sequence:  Hypothetical Probe Sequence
tcccggacggacgcaaagga

SEQ ID NO: 7161 - DNA, 20 bp, Artificial Sequence
  Description of Artificial Sequence:  Hypothetical Probe Sequence
tcccggacagccacctagcc

SEQ ID NO: 7162 - DNA, 20 bp, Artificial Sequence
  Description of Artificial Sequence:  Hypothetical Probe Sequence
tcccacggttgactgtagga

SEQ ID NO: 7163 - DNA, 20 bp, Artificial Sequence
  Description of Artificial Sequence:  Hypothetical Probe Sequence
tcccacgggctttctgcgtt

SEQ ID NO: 7164 - DNA, 20 bp, Artificial Sequence
  Description of Artificial Sequence:  Hypothetical Probe Sequence
tcccacgggtctggtagctt

SEQ ID NO: 7165 - DNA, 20 bp, Artificial Sequence
  Description of Artificial Sequence:  Hypothetical Probe Sequence
tcccacggcctatcccatac

SEQ ID NO: 7166 - DNA, 20 bp, Artificial Sequence
  Description of Artificial Sequence:  Hypothetical Probe Sequence
acggtgcgcctaatacgcaa

SEQ ID NO: 7167 - DNA, 20 bp, Artificial Sequence
  Description of Artificial Sequence:  Hypothetical Probe Sequence
acgggaccatacctgttgcg

SEQ ID NO: 7168 - DNA, 20 bp, Artificial Sequence
  Description of Artificial Sequence:  Hypothetical Probe Sequence
tcccacgggtgcatcgttag

SEQ ID NO: 7169 - DNA, 20 bp, Artificial Sequence
  Description of Artificial Sequence:  Hypothetical Probe Sequence
tcccagccttgatctgatcg

SEQ ID NO: 7170 - DNA, 20 bp, Artificial Sequence
  Description of Artificial Sequence:  Hypothetical Probe Sequence
tcccagcctgatgatgtgcg

SEQ ID NO: 7171 - DNA, 20 bp, Artificial Sequence
  Description of Artificial Sequence:  Hypothetical Probe Sequence
tcccagccttagagtgcttg

SEQ ID NO: 7172 - DNA, 20 bp, Artificial Sequence
  Description of Artificial Sequence:  Hypothetical Probe Sequence
tcccagccatacaatcacgg

SEQ ID NO: 7173 - DNA, 20 bp, Artificial Sequence
  Description of Artificial Sequence:  Hypothetical Probe Sequence
tcccagcctctgttgagtgc

SEQ ID NO: 7174 - DNA, 20 bp, Artificial Sequence
  Description of Artificial Sequence:  Hypothetical Probe Sequence
tcccagcctcgtgtctacgg

SEQ ID NO: 7175 - DNA, 20 bp, Artificial Sequence
  Description of Artificial Sequence:  Hypothetical Probe Sequence
tcccagccctcattagtccc

SEQ ID NO: 7176 - DNA, 20 bp, Artificial Sequence
  Description of Artificial Sequence:  Hypothetical Probe Sequence
tcccagccgcttcctaacct

SEQ ID NO: 7177 - DNA, 20 bp, Artificial Sequence
  Description of Artificial Sequence:  Hypothetical Probe Sequence
tcccagccggtattaggacc

SEQ ID NO: 7178 - DNA, 20 bp, Artificial Sequence
  Description of Artificial Sequence:  Hypothetical Probe Sequence
tcccagccagtgttagccta

SEQ ID NO: 7179 - DNA, 20 bp, Artificial Sequence
  Description of Artificial Sequence:  Hypothetical Probe Sequence
tcccagccacctatactgcg

SEQ ID NO: 7180 - DNA, 20 bp, Artificial Sequence
  Description of Artificial Sequence:  Hypothetical Probe Sequence
tcccagccatcggtgctgat

SEQ ID NO: 7181 - DNA, 20 bp, Artificial Sequence
  Description of Artificial Sequence:  Hypothetical Probe Sequence
tcccagcctcccaccttgat

SEQ ID NO: 7182 - DNA, 20 bp, Artificial Sequence
  Description of Artificial Sequence:  Hypothetical Probe Sequence
tcccagcccacgggtaagcc

SEQ ID NO: 7183 - DNA, 20 bp, Artificial Sequence
  Description of Artificial Sequence:  Hypothetical Probe Sequence
tcccagcccagccttggatg

SEQ ID NO: 7184 - DNA, 20 bp, Artificial Sequence
  Description of Artificial Sequence:  Hypothetical Probe Sequence
tcccagccgtgcaaagagga

SEQ ID NO: 7185 - DNA, 20 bp, Artificial Sequence
  Description of Artificial Sequence:  Hypothetical Probe Sequence
tgcgttgattgagagtacgg

SEQ ID NO: 7186 - DNA, 20 bp, Artificial Sequence
  Description of Artificial Sequence:  Hypothetical Probe Sequence
tgcgttgaaaagatcgtgcg

SEQ ID NO: 7187 - DNA, 20 bp, Artificial Sequence
  Description of Artificial Sequence:  Hypothetical Probe Sequence
tgcgttgacgttctgtccta

SEQ ID NO: 7188 - DNA, 20 bp, Artificial Sequence
  Description of Artificial Sequence:  Hypothetical Probe Sequence
tgcgttgaccattcgtatcg

SEQ ID NO: 7189 - DNA, 20 bp, Artificial Sequence
  Description of Artificial Sequence:  Hypothetical Probe Sequence
tgcgttgacacgcgttttga

SEQ ID NO: 7190 - DNA, 20 bp, Artificial Sequence
  Description of Artificial Sequence:  Hypothetical Probe Sequence
tgcgttgaggacgatgtccc

SEQ ID NO: 7191 - DNA, 20 bp, Artificial Sequence
  Description of Artificial Sequence:  Hypothetical Probe Sequence
tgcgttgaagccagtgcgaa

SEQ ID NO: 7192 - DNA, 20 bp, Artificial Sequence
  Description of Artificial Sequence:  Hypothetical Probe Sequence
tgcgtgattgtccagccttg

SEQ ID NO: 7193 - DNA, 20 bp, Artificial Sequence
  Description of Artificial Sequence:  Hypothetical Probe Sequence
tgcgtgatcttgggactccc

SEQ ID NO: 7194 - DNA, 20 bp, Artificial Sequence
  Description of Artificial Sequence:  Hypothetical Probe Sequence
tgcgtgatgctttcccacct

SEQ ID NO: 7195 - DNA, 20 bp, Artificial Sequence
  Description of Artificial Sequence:  Hypothetical Probe Sequence
tgcgtgatgagtcagccagc

SEQ ID NO: 7196 - DNA, 20 bp, Artificial Sequence
  Description of Artificial Sequence:  Hypothetical Probe Sequence
tgatgcaactgtccattgcg

SEQ ID NO: 7197 - DNA, 20 bp, Artificial Sequence
  Description of Artificial Sequence:  Hypothetical Probe Sequence
tgcgtgattcccacctcttg

SEQ ID NO: 7198 - DNA, 20 bp, Artificial Sequence
  Description of Artificial Sequence:  Hypothetical Probe Sequence
tgcgtgatggacccatatcg

SEQ ID NO: 7199 - DNA, 20 bp, Artificial Sequence
  Description of Artificial Sequence:  Hypothetical Probe Sequence
tgatagcccagcaatcgcaa

SEQ ID NO: 7200 - DNA, 20 bp, Artificial Sequence
  Description of Artificial Sequence:  Hypothetical Probe Sequence
tgcgttagttgagaccgctt

SEQ ID NO: 7201 - DNA, 20 bp, Artificial Sequence
  Description of Artificial Sequence:  Hypothetical Probe Sequence
tgcgttagaaaggacccacg

SEQ ID NO: 7202 - DNA, 20 bp, Artificial Sequence
  Description of Artificial Sequence:  Hypothetical Probe Sequence
tgcgttagcgaatgtcggac

SEQ ID NO: 7203 - DNA, 20 bp, Artificial Sequence
  Description of Artificial Sequence:  Hypothetical Probe Sequence
tgcgttaggctttcccagtg

SEQ ID NO: 7204 - DNA, 20 bp, Artificial Sequence
  Description of Artificial Sequence:  Hypothetical Probe Sequence
ttagtgcgcgaaatactgcg

SEQ ID NO: 7205 - DNA, 20 bp, Artificial Sequence
  Description of Artificial Sequence:  Hypothetical Probe Sequence
tgcgttaggtgcttgagcaa

SEQ ID NO: 7206 - DNA, 20 bp, Artificial Sequence
  Description of Artificial Sequence:  Hypothetical Probe Sequence
tgcgttagacgggatgtgcg

SEQ ID NO: 7207 - DNA, 20 bp, Artificial Sequence
  Description of Artificial Sequence:  Hypothetical Probe Sequence
tgcgttagagccgcttgatg

SEQ ID NO: 7208 - DNA, 20 bp, Artificial Sequence
  Description of Artificial Sequence:  Hypothetical Probe Sequence
tgcgaatcaaagatcgtccc

SEQ ID NO: 7209 - DNA, 20 bp, Artificial Sequence
  Description of Artificial Sequence:  Hypothetical Probe Sequence
tgcgaatctcgttcgtcacg

SEQ ID NO: 7210 - DNA, 20 bp, Artificial Sequence
  Description of Artificial Sequence:  Hypothetical Probe Sequence
tgcgaatcctcagacccgaa

SEQ ID NO: 7211 - DNA, 20 bp, Artificial Sequence
  Description of Artificial Sequence:  Hypothetical Probe Sequence
tgcgaatcccattcccgtct

SEQ ID NO: 7212 - DNA, 20 bp, Artificial Sequence
  Description of Artificial Sequence:  Hypothetical Probe Sequence
tgcgaatcgagtagccgtgc

SEQ ID NO: 7213 - DNA, 20 bp, Artificial Sequence
  Description of Artificial Sequence:  Hypothetical Probe Sequence
tgcgaatcagtgcagctgcg

SEQ ID NO: 7214 - DNA, 20 bp, Artificial Sequence
  Description of Artificial Sequence:  Hypothetical Probe Sequence
tgcgaatccacgcgaactca

SEQ ID NO: 7215 - DNA, 20 bp, Artificial Sequence
  Description of Artificial Sequence:  Hypothetical Probe Sequence
tgcgatacggtatgatagcc

SEQ ID NO: 7216 - DNA, 20 bp, Artificial Sequence
  Description of Artificial Sequence:  Hypothetical Probe Sequence
tgcgatacgcaactgtgcaa

SEQ ID NO: 7217 - DNA, 20 bp, Artificial Sequence
  Description of Artificial Sequence:  Hypothetical Probe Sequence
tgcgataccctagcttgtgc

SEQ ID NO: 7218 - DNA, 20 bp, Artificial Sequence
  Description of Artificial Sequence:  Hypothetical Probe Sequence
tgcgatacgatggctttccc

SEQ ID NO: 7219 - DNA, 20 bp, Artificial Sequence
  Description of Artificial Sequence:  Hypothetical Probe Sequence
tgcgaaagaaagtcccgctt

SEQ ID NO: 7220 - DNA, 20 bp, Artificial Sequence
  Description of Artificial Sequence:  Hypothetical Probe Sequence
tgcgaaagtcgtcttgtgcg

SEQ ID NO: 7221 - DNA, 20 bp, Artificial Sequence
  Description of Artificial Sequence:  Hypothetical Probe Sequence
tgcgaaagcgttggacatcg

SEQ ID NO: 7222 - DNA, 20 bp, Artificial Sequence
  Description of Artificial Sequence:  Hypothetical Probe Sequence
tgcgaaagggtatcgtcacg

SEQ ID NO: 7223 - DNA, 20 bp, Artificial Sequence
  Description of Artificial Sequence:  Hypothetical Probe Sequence
tgcgaaaggagtgatgcacg

SEQ ID NO: 7224 - DNA, 20 bp, Artificial Sequence
  Description of Artificial Sequence:  Hypothetical Probe Sequence
tgcgaaagacctttagacgg

SEQ ID NO: 7225 - DNA, 20 bp, Artificial Sequence
  Description of Artificial Sequence:  Hypothetical Probe Sequence
tgcgaaagtccccgttgagt

SEQ ID NO: 7226 - DNA, 20 bp, Artificial Sequence
  Description of Artificial Sequence:  Hypothetical Probe Sequence
tgcgtacaaaagtgcgcttg

SEQ ID NO: 7227 - DNA, 20 bp, Artificial Sequence
  Description of Artificial Sequence:  Hypothetical Probe Sequence
tgcgtacaacctacggtccc

SEQ ID NO: 7228 - DNA, 20 bp, Artificial Sequence
  Description of Artificial Sequence:  Hypothetical Probe Sequence
tgcgtacagaccacggacgg

SEQ ID NO: 7229 - DNA, 20 bp, Artificial Sequence
  Description of Artificial Sequence:  Hypothetical Probe Sequence
tgcgtctgttgatcccgagt

SEQ ID NO: 7230 - DNA, 20 bp, Artificial Sequence
  Description of Artificial Sequence:  Hypothetical Probe Sequence
tgcgtctgtgatgtgcacgg

SEQ ID NO: 7231 - DNA, 20 bp, Artificial Sequence
  Description of Artificial Sequence:  Hypothetical Probe Sequence
tgcgtctgtgtctgcgatcg

SEQ ID NO: 7232 - DNA, 20 bp, Artificial Sequence
  Description of Artificial Sequence:  Hypothetical Probe Sequence
tgcgtctgtcgtcctacacg

SEQ ID NO: 7233 - DNA, 20 bp, Artificial Sequence
  Description of Artificial Sequence:  Hypothetical Probe Sequence
tgcgtctgcttgaaaggtgc

SEQ ID NO: 7234 - DNA, 20 bp, Artificial Sequence
  Description of Artificial Sequence:  Hypothetical Probe Sequence
tgcgtctgctcaaggatgcg

SEQ ID NO: 7235 - DNA, 20 bp, Artificial Sequence
  Description of Artificial Sequence:  Hypothetical Probe Sequence
tgcgtctggcttcacgatac

SEQ ID NO: 7236 - DNA, 20 bp, Artificial Sequence
  Description of Artificial Sequence:  Hypothetical Probe Sequence
tgcgtctggtctagtgacgg

SEQ ID NO: 7237 - DNA, 20 bp, Artificial Sequence
  Description of Artificial Sequence:  Hypothetical Probe Sequence
tgcgtctggcaaatcgttga

SEQ ID NO: 7238 - DNA, 20 bp, Artificial Sequence
  Description of Artificial Sequence:  Hypothetical Probe Sequence
tgcgtctgagtgtccctgcg

SEQ ID NO: 7239 - DNA, 20 bp, Artificial Sequence
  Description of Artificial Sequence:  Hypothetical Probe Sequence
tgcgtctgatcgaaagcagc

SEQ ID NO: 7240 - DNA, 20 bp, Artificial Sequence
  Description of Artificial Sequence:  Hypothetical Probe Sequence
tgcgtctgcctattgacacg

SEQ ID NO: 7241 - DNA, 20 bp, Artificial Sequence
  Description of Artificial Sequence:  Hypothetical Probe Sequence
tgcgtctgcagcttagcgtt

SEQ ID NO: 7242 - DNA, 20 bp, Artificial Sequence
  Description of Artificial Sequence:  Hypothetical Probe Sequence
tgcgtgtctgattgcgtccc

SEQ ID NO: 7243 - DNA, 20 bp, Artificial Sequence
  Description of Artificial Sequence:  Hypothetical Probe Sequence
tgcgtgtctctgcacggtgc

SEQ ID NO: 7244 - DNA, 20 bp, Artificial Sequence
  Description of Artificial Sequence:  Hypothetical Probe Sequence
tgcgtgtctgtcgtgcggac

SEQ ID NO: 7245 - DNA, 20 bp, Artificial Sequence
  Description of Artificial Sequence:  Hypothetical Probe Sequence
tgcgtgtcgcttatacagcc

SEQ ID NO: 7246 - DNA, 20 bp, Artificial Sequence
  Description of Artificial Sequence:  Hypothetical Probe Sequence
tgcgtgtcgagttcccagcc

SEQ ID NO: 7247 - DNA, 20 bp, Artificial Sequence
  Description of Artificial Sequence:  Hypothetical Probe Sequence
tgcgtgtcacctatcgatcg

SEQ ID NO: 7248 - DNA, 20 bp, Artificial Sequence
  Description of Artificial Sequence:  Hypothetical Probe Sequence
tgcgtgtcaggaggtatccc

SEQ ID NO: 7249 - DNA, 20 bp, Artificial Sequence
  Description of Artificial Sequence:  Hypothetical Probe Sequence
tgcgtgtcgatggaccctgt

SEQ ID NO: 7250 - DNA, 20 bp, Artificial Sequence
  Description of Artificial Sequence:  Hypothetical Probe Sequence
tgcgtgtctccccgaatcgt

SEQ ID NO: 7251 - DNA, 20 bp, Artificial Sequence
  Description of Artificial Sequence:  Hypothetical Probe Sequence
tgcgtgtcgacctcgtcgtt

SEQ ID NO: 7252 - DNA, 20 bp, Artificial Sequence
  Description of Artificial Sequence:  Hypothetical Probe Sequence
tgcgtcgtctcaaccttcgt

SEQ ID NO: 7253 - DNA, 20 bp, Artificial Sequence
  Description of Artificial Sequence:  Hypothetical Probe Sequence
tcgtctgtttaggtcttgcg

SEQ ID NO: 7254 - DNA, 20 bp, Artificial Sequence
  Description of Artificial Sequence:  Hypothetical Probe Sequence
tgcgtcgtgtctagtgagcc

SEQ ID NO: 7255 - DNA, 20 bp, Artificial Sequence
  Description of Artificial Sequence:  Hypothetical Probe Sequence
tgcgtcgtcctatgcgagga

SEQ ID NO: 7256 - DNA, 20 bp, Artificial Sequence
  Description of Artificial Sequence:  Hypothetical Probe Sequence
tgcgtcgtgatgcgttctgt

SEQ ID NO: 7257 - DNA, 20 bp, Artificial Sequence
  Description of Artificial Sequence:  Hypothetical Probe Sequence
tgcgtcgttccccctattag

SEQ ID NO: 7258 - DNA, 20 bp, Artificial Sequence
  Description of Artificial Sequence:  Hypothetical Probe Sequence
tgcgtcgttgcgggactcgt

SEQ ID NO: 7259 - DNA, 20 bp, Artificial Sequence
  Description of Artificial Sequence:  Hypothetical Probe Sequence
tgcgtcgtcacgcacgctgt

SEQ ID NO: 7260 - DNA, 20 bp, Artificial Sequence
  Description of Artificial Sequence:  Hypothetical Probe Sequence
tgcgtcgtgacccctagacc

SEQ ID NO: 7261 - DNA, 20 bp, Artificial Sequence
  Description of Artificial Sequence:  Hypothetical Probe Sequence
tgcgtcgtggactcgtcacg

SEQ ID NO: 7262 - DNA, 20 bp, Artificial Sequence
  Description of Artificial Sequence:  Hypothetical Probe Sequence
tgcgcttgttagagccttga

SEQ ID NO: 7263 - DNA, 20 bp, Artificial Sequence
  Description of Artificial Sequence:  Hypothetical Probe Sequence
tgcgcttgtacaataccagc

SEQ ID NO: 7264 - DNA, 20 bp, Artificial Sequence
  Description of Artificial Sequence:  Hypothetical Probe Sequence
tgcgcttgtctgcgaacgtt

SEQ ID NO: 7265 - DNA, 20 bp, Artificial Sequence
  Description of Artificial Sequence:  Hypothetical Probe Sequence
tgcgcttgcgtttcgttgat

SEQ ID NO: 7266 - DNA, 20 bp, Artificial Sequence
  Description of Artificial Sequence:  Hypothetical Probe Sequence
tgcgcttgctcaataccgaa

SEQ ID NO: 7267 - DNA, 20 bp, Artificial Sequence
  Description of Artificial Sequence:  Hypothetical Probe Sequence
tgcgcttgctgtcgaaccat

SEQ ID NO: 7268 - DNA, 20 bp, Artificial Sequence
  Description of Artificial Sequence:  Hypothetical Probe Sequence
tgcgcttggagtatcgaatc

SEQ ID NO: 7269 - DNA, 20 bp, Artificial Sequence
  Description of Artificial Sequence:  Hypothetical Probe Sequence
tgcgcttgagtgaatccttg

SEQ ID NO: 7270 - DNA, 20 bp, Artificial Sequence
  Description of Artificial Sequence:  Hypothetical Probe Sequence
tgcgcttgatcgatcgagtg

SEQ ID NO: 7271 - DNA, 20 bp, Artificial Sequence
  Description of Artificial Sequence:  Hypothetical Probe Sequence
tgcgcttggatgacgggagt

SEQ ID NO: 7272 - DNA, 20 bp, Artificial Sequence
  Description of Artificial Sequence:  Hypothetical Probe Sequence
tgcgcttgcagccacggagt

SEQ ID NO: 7273 - DNA, 20 bp, Artificial Sequence
  Description of Artificial Sequence:  Hypothetical Probe Sequence
tgcgcttggtgcacctcgtt

SEQ ID NO: 7274 - DNA, 20 bp, Artificial Sequence
  Description of Artificial Sequence:  Hypothetical Probe Sequence
tgcgcttgagccgaccacct

SEQ ID NO: 7275 - DNA, 20 bp, Artificial Sequence
  Description of Artificial Sequence:  Hypothetical Probe Sequence
tgcgcgttaatccctaccat

SEQ ID NO: 7276 - DNA, 20 bp, Artificial Sequence
  Description of Artificial Sequence:  Hypothetical Probe Sequence
tgcgcgttatactctgagcc

SEQ ID NO: 7277 - DNA, 20 bp, Artificial Sequence
  Description of Artificial Sequence:  Hypothetical Probe Sequence
tgcgcgttaaagaatcgcaa

SEQ ID NO: 7278 - DNA, 20 bp, Artificial Sequence
  Description of Artificial Sequence:  Hypothetical Probe Sequence
tgcgcgtttctgcttgatcg

SEQ ID NO: 7279 - DNA, 20 bp, Artificial Sequence
  Description of Artificial Sequence:  Hypothetical Probe Sequence
tgcgcgtttcgtcgaacgaa

SEQ ID NO: 7280 - DNA, 20 bp, Artificial Sequence
  Description of Artificial Sequence:  Hypothetical Probe Sequence
tgcgcgttcgttagtgcttg

SEQ ID NO: 7281 - DNA, 20 bp, Artificial Sequence
  Description of Artificial Sequence:  Hypothetical Probe Sequence
tgcgcgttggtaccatttag

SEQ ID NO: 7282 - DNA, 20 bp, Artificial Sequence
  Description of Artificial Sequence:  Hypothetical Probe Sequence
tgcgcgttgtctggtagacc

SEQ ID NO: 7283 - DNA, 20 bp, Artificial Sequence
  Description of Artificial Sequence:  Hypothetical Probe Sequence
tgcgcgttatcgttgattga

SEQ ID NO: 7284 - DNA, 20 bp, Artificial Sequence
  Description of Artificial Sequence:  Hypothetical Probe Sequence
tgcgcgttgatgtcccttga

SEQ ID NO: 7285 - DNA, 20 bp, Artificial Sequence
  Description of Artificial Sequence:  Hypothetical Probe Sequence
tgcgcgtttcccgcttacct

SEQ ID NO: 7286 - DNA, 20 bp, Artificial Sequence
  Description of Artificial Sequence:  Hypothetical Probe Sequence
tgcgcgttcacggagtcacg

SEQ ID NO: 7287 - DNA, 20 bp, Artificial Sequence
  Description of Artificial Sequence:  Hypothetical Probe Sequence
tgcgcgttcagcttagagcc

SEQ ID NO: 7288 - DNA, 20 bp, Artificial Sequence
  Description of Artificial Sequence:  Hypothetical Probe Sequence
tgcgcgttgacctcccatac

SEQ ID NO: 7289 - DNA, 20 bp, Artificial Sequence
  Description of Artificial Sequence:  Hypothetical Probe Sequence
tgcgcgttacggggtagatg

SEQ ID NO: 7290 - DNA, 20 bp, Artificial Sequence
  Description of Artificial Sequence:  Hypothetical Probe Sequence
tgcgctcatgataatcagcc

SEQ ID NO: 7291 - DNA, 20 bp, Artificial Sequence
  Description of Artificial Sequence:  Hypothetical Probe Sequence
tgcgctcattagcacgcacg

SEQ ID NO: 7292 - DNA, 20 bp, Artificial Sequence
  Description of Artificial Sequence:  Hypothetical Probe Sequence
tgcgctcaaaagctcaatcg

SEQ ID NO: 7293 - DNA, 20 bp, Artificial Sequence
  Description of Artificial Sequence:  Hypothetical Probe Sequence
tgcgctcatacatgcgggta

SEQ ID NO: 7294 - DNA, 20 bp, Artificial Sequence
  Description of Artificial Sequence:  Hypothetical Probe Sequence
tgcgctcatctgatcgtgtc

SEQ ID NO: 7295 - DNA, 20 bp, Artificial Sequence
  Description of Artificial Sequence:  Hypothetical Probe Sequence
tgcgctcacgttatcgcttg

SEQ ID NO: 7296 - DNA, 20 bp, Artificial Sequence
  Description of Artificial Sequence:  Hypothetical Probe Sequence
tgcgctcactgttcccgtct

SEQ ID NO: 7297 - DNA, 20 bp, Artificial Sequence
  Description of Artificial Sequence:  Hypothetical Probe Sequence
tgcgctcagcaaagtgctca

SEQ ID NO: 7298 - DNA, 20 bp, Artificial Sequence
  Description of Artificial Sequence:  Hypothetical Probe Sequence
tgcgctcacctacgaaaaag

SEQ ID NO: 7299 - DNA, 20 bp, Artificial Sequence
  Description of Artificial Sequence:  Hypothetical Probe Sequence
tgcgctcagatggtgcgagt

SEQ ID NO: 7300 - DNA, 20 bp, Artificial Sequence
  Description of Artificial Sequence:  Hypothetical Probe Sequence
tgcgctgttgataaagtgcg

SEQ ID NO: 7301 - DNA, 20 bp, Artificial Sequence
  Description of Artificial Sequence:  Hypothetical Probe Sequence
tgcgctgtaatcgcttgtct

SEQ ID NO: 7302 - DNA, 20 bp, Artificial Sequence
  Description of Artificial Sequence:  Hypothetical Probe Sequence
tgcgctgtatacgaccacgg

SEQ ID NO: 7303 - DNA, 20 bp, Artificial Sequence
  Description of Artificial Sequence:  Hypothetical Probe Sequence
tgcgctgttacacctaacgg

SEQ ID NO: 7304 - DNA, 20 bp, Artificial Sequence
  Description of Artificial Sequence:  Hypothetical Probe Sequence
tgcgctgttctgtgatagcc

SEQ ID NO: 7305 - DNA, 20 bp, Artificial Sequence
  Description of Artificial Sequence:  Hypothetical Probe Sequence
tgcgctgttgtcaatcgcaa

SEQ ID NO: 7306 - DNA, 20 bp, Artificial Sequence
  Description of Artificial Sequence:  Hypothetical Probe Sequence
tgcgctgtcttggaccagtg

SEQ ID NO: 7307 - DNA, 20 bp, Artificial Sequence
  Description of Artificial Sequence:  Hypothetical Probe Sequence
tgcgctgtctcaccattctg

SEQ ID NO: 7308 - DNA, 20 bp, Artificial Sequence
  Description of Artificial Sequence:  Hypothetical Probe Sequence
tgcgctgtctgttctgcgaa

SEQ ID NO: 7309 - DNA, 20 bp, Artificial Sequence
  Description of Artificial Sequence:  Hypothetical Probe Sequence
tgcgctgtccatcctaaaag

SEQ ID NO: 7310 - DNA, 20 bp, Artificial Sequence
  Description of Artificial Sequence:  Hypothetical Probe Sequence
tgcgctgtcgaaaatcccat

SEQ ID NO: 7311 - DNA, 20 bp, Artificial Sequence
  Description of Artificial Sequence:  Hypothetical Probe Sequence
tgcgctgtggtagagttccc

SEQ ID NO: 7312 - DNA, 20 bp, Artificial Sequence
  Description of Artificial Sequence:  Hypothetical Probe Sequence
tgcgctgtagtgggaccgtt

SEQ ID NO: 7313 - DNA, 20 bp, Artificial Sequence
  Description of Artificial Sequence:  Hypothetical Probe Sequence
tgcgctgtcagcttagctca

SEQ ID NO: 7314 - DNA, 20 bp, Artificial Sequence
  Description of Artificial Sequence:  Hypothetical Probe Sequence
tgcgctgtgaccggacccat

SEQ ID NO: 7315 - DNA, 20 bp, Artificial Sequence
  Description of Artificial Sequence:  Hypothetical Probe Sequence
tgcgctgtacgggtgctctg

SEQ ID NO: 7316 - DNA, 20 bp, Artificial Sequence
  Description of Artificial Sequence:  Hypothetical Probe Sequence
tgcgctgtagccgagtcttg

SEQ ID NO: 7317 - DNA, 20 bp, Artificial Sequence
  Description of Artificial Sequence:  Hypothetical Probe Sequence
tgcgccatttgaacctatcg

SEQ ID NO: 7318 - DNA, 20 bp, Artificial Sequence
  Description of Artificial Sequence:  Hypothetical Probe Sequence
tgcgccatttaggagtcgtt

SEQ ID NO: 7319 - DNA, 20 bp, Artificial Sequence
  Description of Artificial Sequence:  Hypothetical Probe Sequence
tgcgccataatctctgtgcg

SEQ ID NO: 7320 - DNA, 20 bp, Artificial Sequence
  Description of Artificial Sequence:  Hypothetical Probe Sequence
tgcgccatcgaagtctttga

SEQ ID NO: 7321 - DNA, 20 bp, Artificial Sequence
  Description of Artificial Sequence:  Hypothetical Probe Sequence
tgcgccatgtctgatggacc

SEQ ID NO: 7322 - DNA, 20 bp, Artificial Sequence
  Description of Artificial Sequence:  Hypothetical Probe Sequence
tgcgccatatcggtctcagc

SEQ ID NO: 7323 - DNA, 20 bp, Artificial Sequence
  Description of Artificial Sequence:  Hypothetical Probe Sequence
tgcgccattccctcgttaca

SEQ ID NO: 7324 - DNA, 20 bp, Artificial Sequence
  Description of Artificial Sequence:  Hypothetical Probe Sequence
tgcgccatgacctgatcttg

SEQ ID NO: 7325 - DNA, 20 bp, Artificial Sequence
  Description of Artificial Sequence:  Hypothetical Probe Sequence
tgcgccatggacccatcgaa

SEQ ID NO: 7326 - DNA, 20 bp, Artificial Sequence
  Description of Artificial Sequence:  Hypothetical Probe Sequence
tgcgccatacggctgtctca

SEQ ID NO: 7327 - DNA, 20 bp, Artificial Sequence
  Description of Artificial Sequence:  Hypothetical Probe Sequence
tgcgcgaatgatcgttcttg

SEQ ID NO: 7328 - DNA, 20 bp, Artificial Sequence
  Description of Artificial Sequence:  Hypothetical Probe Sequence
tgcgcgaaaatcaaagcagc

SEQ ID NO: 7329 - DNA, 20 bp, Artificial Sequence
  Description of Artificial Sequence:  Hypothetical Probe Sequence
tgcgcgaactcagaccagga

SEQ ID NO: 7330 - DNA, 20 bp, Artificial Sequence
  Description of Artificial Sequence:  Hypothetical Probe Sequence
tgcgcgaaccatctgttgtc

SEQ ID NO: 7331 - DNA, 20 bp, Artificial Sequence
  Description of Artificial Sequence:  Hypothetical Probe Sequence
tgcgcgaacgaaagccaaag

SEQ ID NO: 7332 - DNA, 20 bp, Artificial Sequence
  Description of Artificial Sequence:  Hypothetical Probe Sequence
tgcgcgaagcaactcaccat

SEQ ID NO: 7333 - DNA, 20 bp, Artificial Sequence
  Description of Artificial Sequence:  Hypothetical Probe Sequence
tgcgcgaaatcgtgatccat

SEQ ID NO: 7334 - DNA, 20 bp, Artificial Sequence
  Description of Artificial Sequence:  Hypothetical Probe Sequence
tgcgcgaaaggagatggtgc

SEQ ID NO: 7335 - DNA, 20 bp, Artificial Sequence
  Description of Artificial Sequence:  Hypothetical Probe Sequence
tgcgcgaatccccctacagc

SEQ ID NO: 7336 - DNA, 20 bp, Artificial Sequence
  Description of Artificial Sequence:  Hypothetical Probe Sequence
tgcggcttatacaatcgctt

SEQ ID NO: 7337 - DNA, 20 bp, Artificial Sequence
  Description of Artificial Sequence:  Hypothetical Probe Sequence
tgcggctttctgcagctcgt

SEQ ID NO: 7338 - DNA, 20 bp, Artificial Sequence
  Description of Artificial Sequence:  Hypothetical Probe Sequence
tgcggcttcttgctgtgacc

SEQ ID NO: 7339 - DNA, 20 bp, Artificial Sequence
  Description of Artificial Sequence:  Hypothetical Probe Sequence
tgcggcttctcaagtgagtg

SEQ ID NO: 7340 - DNA, 20 bp, Artificial Sequence
  Description of Artificial Sequence:  Hypothetical Probe Sequence
tgcggcttcgaattgatctg

SEQ ID NO: 7341 - DNA, 20 bp, Artificial Sequence
  Description of Artificial Sequence:  Hypothetical Probe Sequence
tgcggcttgcaatctgaaag

SEQ ID NO: 7342 - DNA, 20 bp, Artificial Sequence
  Description of Artificial Sequence:  Hypothetical Probe Sequence
tgcggctttccccagcccta

SEQ ID NO: 7343 - DNA, 20 bp, Artificial Sequence
  Description of Artificial Sequence:  Hypothetical Probe Sequence
tgcggcttcacgggaccgaa

SEQ ID NO: 7344 - DNA, 20 bp, Artificial Sequence
  Description of Artificial Sequence:  Hypothetical Probe Sequence
tgcggcttagccgacccgaa

SEQ ID NO: 7345 - DNA, 20 bp, Artificial Sequence
  Description of Artificial Sequence:  Hypothetical Probe Sequence
tgcgggtaaaagaggaggac

SEQ ID NO: 7346 - DNA, 20 bp, Artificial Sequence
  Description of Artificial Sequence:  Hypothetical Probe Sequence
tgcgggtatacaccatacgg

SEQ ID NO: 7347 - DNA, 20 bp, Artificial Sequence
  Description of Artificial Sequence:  Hypothetical Probe Sequence
tgcgggtatgtccacgaaag

SEQ ID NO: 7348 - DNA, 20 bp, Artificial Sequence
  Description of Artificial Sequence:  Hypothetical Probe Sequence
tgcgggtacgttcagccttg

SEQ ID NO: 7349 - DNA, 20 bp, Artificial Sequence
  Description of Artificial Sequence:  Hypothetical Probe Sequence
tgcgggtactcagcaacgtt

SEQ ID NO: 7350 - DNA, 20 bp, Artificial Sequence
  Description of Artificial Sequence:  Hypothetical Probe Sequence
tgcgggtactgtgcaacttg

SEQ ID NO: 7351 - DNA, 20 bp, Artificial Sequence
  Description of Artificial Sequence:  Hypothetical Probe Sequence
tgcgggtagcttagccgagt

SEQ ID NO: 7352 - DNA, 20 bp, Artificial Sequence
  Description of Artificial Sequence:  Hypothetical Probe Sequence
tgcgggtagagtggaccttg

SEQ ID NO: 7353 - DNA, 20 bp, Artificial Sequence
  Description of Artificial Sequence:  Hypothetical Probe Sequence
tgcgggtacctagacccagc

SEQ ID NO: 7354 - DNA, 20 bp, Artificial Sequence
  Description of Artificial Sequence:  Hypothetical Probe Sequence
tgcgggtacacgtgtcacgg

SEQ ID NO: 7355 - DNA, 20 bp, Artificial Sequence
  Description of Artificial Sequence:  Hypothetical Probe Sequence
tgcgggtagtgctgtctgtc

SEQ ID NO: 7356 - DNA, 20 bp, Artificial Sequence
  Description of Artificial Sequence:  Hypothetical Probe Sequence
tgcgggtaggaccctagagt

SEQ ID NO: 7357 - DNA, 20 bp, Artificial Sequence
  Description of Artificial Sequence:  Hypothetical Probe Sequence
tgcgggtaagccgtctgcaa

SEQ ID NO: 7358 - DNA, 20 bp, Artificial Sequence
  Description of Artificial Sequence:  Hypothetical Probe Sequence
tgcggtcttgatcgaatcgt

SEQ ID NO: 7359 - DNA, 20 bp, Artificial Sequence
  Description of Artificial Sequence:  Hypothetical Probe Sequence
tgcggtctttagctgttcgt

SEQ ID NO: 7360 - DNA, 20 bp, Artificial Sequence
  Description of Artificial Sequence:  Hypothetical Probe Sequence
tgcggtctaaaggatgcagc

SEQ ID NO: 7361 - DNA, 20 bp, Artificial Sequence
  Description of Artificial Sequence:  Hypothetical Probe Sequence
tgcggtcttctgtcccttag

SEQ ID NO: 7362 - DNA, 20 bp, Artificial Sequence
  Description of Artificial Sequence:  Hypothetical Probe Sequence
tgcggtcttgtccagccgtt

SEQ ID NO: 7363 - DNA, 20 bp, Artificial Sequence
  Description of Artificial Sequence:  Hypothetical Probe Sequence
tgcggtctcttgggtatccc

SEQ ID NO: 7364 - DNA, 20 bp, Artificial Sequence
  Description of Artificial Sequence:  Hypothetical Probe Sequence
tgcggtctctgtttgaatcg

SEQ ID NO: 7365 - DNA, 20 bp, Artificial Sequence
  Description of Artificial Sequence:  Hypothetical Probe Sequence
tgcggtctcgaaaggagcaa

SEQ ID NO: 7366 - DNA, 20 bp, Artificial Sequence
  Description of Artificial Sequence:  Hypothetical Probe Sequence
tgcggtctggtatcccgacc

SEQ ID NO: 7367 - DNA, 20 bp, Artificial Sequence
  Description of Artificial Sequence:  Hypothetical Probe Sequence
tgcggtctgagtagtgtgcg

SEQ ID NO: 7368 - DNA, 20 bp, Artificial Sequence
  Description of Artificial Sequence:  Hypothetical Probe Sequence
tgcggtctacctgcaaaaag

SEQ ID NO: 7369 - DNA, 20 bp, Artificial Sequence
  Description of Artificial Sequence:  Hypothetical Probe Sequence
tgcggtctatcggaccgatg

SEQ ID NO: 7370 - DNA, 20 bp, Artificial Sequence
  Description of Artificial Sequence:  Hypothetical Probe Sequence
tgcggtctaggaaaaggacc

SEQ ID NO: 7371 - DNA, 20 bp, Artificial Sequence
  Description of Artificial Sequence:  Hypothetical Probe Sequence
tgcggtctgatgaaagcttg

SEQ ID NO: 7372 - DNA, 20 bp, Artificial Sequence
  Description of Artificial Sequence:  Hypothetical Probe Sequence
tgcggtctcagccgaacttg

SEQ ID NO: 7373 - DNA, 20 bp, Artificial Sequence
  Description of Artificial Sequence:  Hypothetical Probe Sequence
tgcggagttgatagccttag

SEQ ID NO: 7374 - DNA, 20 bp, Artificial Sequence
  Description of Artificial Sequence:  Hypothetical Probe Sequence
tgcggagtatacgtgcggta

SEQ ID NO: 7375 - DNA, 20 bp, Artificial Sequence
  Description of Artificial Sequence:  Hypothetical Probe Sequence
tgcggagttctgatacgcaa

SEQ ID NO: 7376 - DNA, 20 bp, Artificial Sequence
  Description of Artificial Sequence:  Hypothetical Probe Sequence
tgcggagttcgttctggacc

SEQ ID NO: 7377 - DNA, 20 bp, Artificial Sequence
  Description of Artificial Sequence:  Hypothetical Probe Sequence
tgcggagtgcaagacccgaa

SEQ ID NO: 7378 - DNA, 20 bp, Artificial Sequence
  Description of Artificial Sequence:  Hypothetical Probe Sequence
tgcggagttccctgtcgatg

SEQ ID NO: 7379 - DNA, 20 bp, Artificial Sequence
  Description of Artificial Sequence:  Hypothetical Probe Sequence
tgcggagtgtgcgtgcacct

SEQ ID NO: 7380 - DNA, 20 bp, Artificial Sequence
  Description of Artificial Sequence:  Hypothetical Probe Sequence
tgcggagtggaccgttgagt

SEQ ID NO: 7381 - DNA, 20 bp, Artificial Sequence
  Description of Artificial Sequence:  Hypothetical Probe Sequence
tgcggcaattgagatgcgtt

SEQ ID NO: 7382 - DNA, 20 bp, Artificial Sequence
  Description of Artificial Sequence:  Hypothetical Probe Sequence
tgcggcaattagcgttacct

SEQ ID NO: 7383 - DNA, 20 bp, Artificial Sequence
  Description of Artificial Sequence:  Hypothetical Probe Sequence
tgcggcaaaatcttagcagc

SEQ ID NO: 7384 - DNA, 20 bp, Artificial Sequence
  Description of Artificial Sequence:  Hypothetical Probe Sequence
tgcggcaaaaagttagggac

SEQ ID NO: 7385 - DNA, 20 bp, Artificial Sequence
  Description of Artificial Sequence:  Hypothetical Probe Sequence
tgcggcaatctgataccttg

SEQ ID NO: 7386 - DNA, 20 bp, Artificial Sequence
  Description of Artificial Sequence:  Hypothetical Probe Sequence
tgcggcaacgaatgattccc

SEQ ID NO: 7387 - DNA, 20 bp, Artificial Sequence
  Description of Artificial Sequence:  Hypothetical Probe Sequence
tgcggcaagcttaaaggagt

SEQ ID NO: 7388 - DNA, 20 bp, Artificial Sequence
  Description of Artificial Sequence:  Hypothetical Probe Sequence
tgcggcaagtctgacccacg

SEQ ID NO: 7389 - DNA, 20 bp, Artificial Sequence
  Description of Artificial Sequence:  Hypothetical Probe Sequence
tgcggcaagagtatcgatcg

SEQ ID NO: 7390 - DNA, 20 bp, Artificial Sequence
  Description of Artificial Sequence:  Hypothetical Probe Sequence
tgcggcaagatgaggaaaag

SEQ ID NO: 7391 - DNA, 20 bp, Artificial Sequence
  Description of Artificial Sequence:  Hypothetical Probe Sequence
tgcggcaatcccgcttatac

SEQ ID NO: 7392 - DNA, 20 bp, Artificial Sequence
  Description of Artificial Sequence:  Hypothetical Probe Sequence
tgcggcaacagcaaagacct

SEQ ID NO: 7393 - DNA, 20 bp, Artificial Sequence
  Description of Artificial Sequence:  Hypothetical Probe Sequence
tgcggcaagacccctaacct

SEQ ID NO: 7394 - DNA, 20 bp, Artificial Sequence
  Description of Artificial Sequence:  Hypothetical Probe Sequence
tgcggcaagtgcaaagcgaa

SEQ ID NO: 7395 - DNA, 20 bp, Artificial Sequence
  Description of Artificial Sequence:  Hypothetical Probe Sequence
tgcgagtgtctgagcccagc

SEQ ID NO: 7396 - DNA, 20 bp, Artificial Sequence
  Description of Artificial Sequence:  Hypothetical Probe Sequence
tgcgagtgtcgttgcgagga

SEQ ID NO: 7397 - DNA, 20 bp, Artificial Sequence
  Description of Artificial Sequence:  Hypothetical Probe Sequence
tgcgagtgcttgcagcatac

SEQ ID NO: 7398 - DNA, 20 bp, Artificial Sequence
  Description of Artificial Sequence:  Hypothetical Probe Sequence
tgcgagtggcttccattgat

SEQ ID NO: 7399 - DNA, 20 bp, Artificial Sequence
  Description of Artificial Sequence:  Hypothetical Probe Sequence
tgcgagtgggtacttgtccc

SEQ ID NO: 7400 - DNA, 20 bp, Artificial Sequence
  Description of Artificial Sequence:  Hypothetical Probe Sequence
tgcgagtgacctcgaatccc

SEQ ID NO: 7401 - DNA, 20 bp, Artificial Sequence
  Description of Artificial Sequence:  Hypothetical Probe Sequence
tgcgagtgaggagatgcgtt

SEQ ID NO: 7402 - DNA, 20 bp, Artificial Sequence
  Description of Artificial Sequence:  Hypothetical Probe Sequence
tgcgagtgtgcggtgccttg

SEQ ID NO: 7403 - DNA, 20 bp, Artificial Sequence
  Description of Artificial Sequence:  Hypothetical Probe Sequence
tgcgagtgcagcacctagtg

SEQ ID NO: 7404 - DNA, 20 bp, Artificial Sequence
  Description of Artificial Sequence:  Hypothetical Probe Sequence
tgcgaccttgatcagcgtgc

SEQ ID NO: 7405 - DNA, 20 bp, Artificial Sequence
  Description of Artificial Sequence:  Hypothetical Probe Sequence
tgcgacctaaaggtgctgcg

SEQ ID NO: 7406 - DNA, 20 bp, Artificial Sequence
  Description of Artificial Sequence:  Hypothetical Probe Sequence
tgcgaccttacaggacagga

SEQ ID NO: 7407 - DNA, 20 bp, Artificial Sequence
  Description of Artificial Sequence:  Hypothetical Probe Sequence
tgcgaccttcgtgtctgacc

SEQ ID NO: 7408 - DNA, 20 bp, Artificial Sequence
  Description of Artificial Sequence:  Hypothetical Probe Sequence
tgcgacctcttgcgtttccc

SEQ ID NO: 7409 - DNA, 20 bp, Artificial Sequence
  Description of Artificial Sequence:  Hypothetical Probe Sequence
tgcgacctctcattaggacc

SEQ ID NO: 7410 - DNA, 20 bp, Artificial Sequence
  Description of Artificial Sequence:  Hypothetical Probe Sequence
tgcgacctctgtcagcccat

SEQ ID NO: 7411 - DNA, 20 bp, Artificial Sequence
  Description of Artificial Sequence:  Hypothetical Probe Sequence
tgcgacctccatgcaacttg

SEQ ID NO: 7412 - DNA, 20 bp, Artificial Sequence
  Description of Artificial Sequence:  Hypothetical Probe Sequence
tgcgacctcgaagcttaaag

SEQ ID NO: 7413 - DNA, 20 bp, Artificial Sequence
  Description of Artificial Sequence:  Hypothetical Probe Sequence
tgcgacctggtaaaagcttg

SEQ ID NO: 7414 - DNA, 20 bp, Artificial Sequence
  Description of Artificial Sequence:  Hypothetical Probe Sequence
tgcgacctagtgaccttgcg

SEQ ID NO: 7415 - DNA, 20 bp, Artificial Sequence
  Description of Artificial Sequence:  Hypothetical Probe Sequence
tgcgacctacctcctaacgg

SEQ ID NO: 7416 - DNA, 20 bp, Artificial Sequence
  Description of Artificial Sequence:  Hypothetical Probe Sequence
tgcgacctatcgcagcatac

SEQ ID NO: 7417 - DNA, 20 bp, Artificial Sequence
  Description of Artificial Sequence:  Hypothetical Probe Sequence
tgcgaccttccccgaacacg

SEQ ID NO: 7418 - DNA, 20 bp, Artificial Sequence
  Description of Artificial Sequence:  Hypothetical Probe Sequence
tgcgaccttgcggtgcagga

SEQ ID NO: 7419 - DNA, 20 bp, Artificial Sequence
  Description of Artificial Sequence:  Hypothetical Probe Sequence
tgcgacctcacgttgacacg

SEQ ID NO: 7420 - DNA, 20 bp, Artificial Sequence
  Description of Artificial Sequence:  Hypothetical Probe Sequence
tgcgacctggaccgttcgaa

SEQ ID NO: 7421 - DNA, 20 bp, Artificial Sequence
  Description of Artificial Sequence:  Hypothetical Probe Sequence
tgcgatcgttgatccccagc

SEQ ID NO: 7422 - DNA, 20 bp, Artificial Sequence
  Description of Artificial Sequence:  Hypothetical Probe Sequence
tgcgatcgtgataatcgatg

SEQ ID NO: 7423 - DNA, 20 bp, Artificial Sequence
  Description of Artificial Sequence:  Hypothetical Probe Sequence
tgcgatcgtgtcgcttcacg

SEQ ID NO: 7424 - DNA, 20 bp, Artificial Sequence
  Description of Artificial Sequence:  Hypothetical Probe Sequence
tgcgatcgcttgtcgtggac

SEQ ID NO: 7425 - DNA, 20 bp, Artificial Sequence
  Description of Artificial Sequence:  Hypothetical Probe Sequence
tgcgatcgccatggtacacg

SEQ ID NO: 7426 - DNA, 20 bp, Artificial Sequence
  Description of Artificial Sequence:  Hypothetical Probe Sequence
tgcgatcgggtaaatccttg

SEQ ID NO: 7427 - DNA, 20 bp, Artificial Sequence
  Description of Artificial Sequence:  Hypothetical Probe Sequence
tgcgatcgagtggcaaccat

SEQ ID NO: 7428 - DNA, 20 bp, Artificial Sequence
  Description of Artificial Sequence:  Hypothetical Probe Sequence
tgcgatcgatcgtgtccttg

SEQ ID NO: 7429 - DNA, 20 bp, Artificial Sequence
  Description of Artificial Sequence:  Hypothetical Probe Sequence
tgcgatcgcctacctacgaa

SEQ ID NO: 7430 - DNA, 20 bp, Artificial Sequence
  Description of Artificial Sequence:  Hypothetical Probe Sequence
tgcgatcgtcccgtctccat

SEQ ID NO: 7431 - DNA, 20 bp, Artificial Sequence
  Description of Artificial Sequence:  Hypothetical Probe Sequence
tgcgatcgcagcaaagtgtc

SEQ ID NO: 7432 - DNA, 20 bp, Artificial Sequence
  Description of Artificial Sequence:  Hypothetical Probe Sequence
tgcgatcgacggacctgcaa

SEQ ID NO: 7433 - DNA, 20 bp, Artificial Sequence
  Description of Artificial Sequence:  Hypothetical Probe Sequence
tgcgatcgagccatacagcc

SEQ ID NO: 7434 - DNA, 20 bp, Artificial Sequence
  Description of Artificial Sequence:  Hypothetical Probe Sequence
tgcgaggattagcacgatcg

SEQ ID NO: 7435 - DNA, 20 bp, Artificial Sequence
  Description of Artificial Sequence:  Hypothetical Probe Sequence
tgcgaggatgtctccctccc

SEQ ID NO: 7436 - DNA, 20 bp, Artificial Sequence
  Description of Artificial Sequence:  Hypothetical Probe Sequence
tgcgaggacttgcacgtaca

SEQ ID NO: 7437 - DNA, 20 bp, Artificial Sequence
  Description of Artificial Sequence:  Hypothetical Probe Sequence
tgcgaggactgtagccccat

SEQ ID NO: 7438 - DNA, 20 bp, Artificial Sequence
  Description of Artificial Sequence:  Hypothetical Probe Sequence
tgcgaggagcaaaaaggacc

SEQ ID NO: 7439 - DNA, 20 bp, Artificial Sequence
  Description of Artificial Sequence:  Hypothetical Probe Sequence
tgcgaggaagtgagtgggac

SEQ ID NO: 7440 - DNA, 20 bp, Artificial Sequence
  Description of Artificial Sequence:  Hypothetical Probe Sequence
tgcgaggaaggatgcgttag

SEQ ID NO: 7441 - DNA, 20 bp, Artificial Sequence
  Description of Artificial Sequence:  Hypothetical Probe Sequence
tgcgaggacagccgttcagc

SEQ ID NO: 7442 - DNA, 20 bp, Artificial Sequence
  Description of Artificial Sequence:  Hypothetical Probe Sequence
tgcgaggaacgggagtcacg

SEQ ID NO: 7443 - DNA, 20 bp, Artificial Sequence
  Description of Artificial Sequence:  Hypothetical Probe Sequence
tgcgcctattgacgaatgtc

SEQ ID NO: 7444 - DNA, 20 bp, Artificial Sequence
  Description of Artificial Sequence:  Hypothetical Probe Sequence
tgcgcctatacaagccggac

SEQ ID NO: 7445 - DNA, 20 bp, Artificial Sequence
  Description of Artificial Sequence:  Hypothetical Probe Sequence
tgcgcctatgtcaggaagcc

SEQ ID NO: 7446 - DNA, 20 bp, Artificial Sequence
  Description of Artificial Sequence:  Hypothetical Probe Sequence
tgcgcctacttgtgcgttga

SEQ ID NO: 7447 - DNA, 20 bp, Artificial Sequence
  Description of Artificial Sequence:  Hypothetical Probe Sequence
tgcgcctacgaaataccagc

SEQ ID NO: 7448 - DNA, 20 bp, Artificial Sequence
  Description of Artificial Sequence:  Hypothetical Probe Sequence
tgcgcctaggtaaatccgtt

SEQ ID NO: 7449 - DNA, 20 bp, Artificial Sequence
  Description of Artificial Sequence:  Hypothetical Probe Sequence
tgcgcctagtctcacgcagc

SEQ ID NO: 7450 - DNA, 20 bp, Artificial Sequence
  Description of Artificial Sequence:  Hypothetical Probe Sequence
tgcgcctatcccgcaatgtc

SEQ ID NO: 7451 - DNA, 20 bp, Artificial Sequence
  Description of Artificial Sequence:  Hypothetical Probe Sequence
tgcgcctatgcgagtgccta

SEQ ID NO: 7452 - DNA, 20 bp, Artificial Sequence
  Description of Artificial Sequence:  Hypothetical Probe Sequence
tgcgcctacacggatgaaag

SEQ ID NO: 7453 - DNA, 20 bp, Artificial Sequence
  Description of Artificial Sequence:  Hypothetical Probe Sequence
tgcgcctaggacaccttgcg

SEQ ID NO: 7454 - DNA, 20 bp, Artificial Sequence
  Description of Artificial Sequence:  Hypothetical Probe Sequence
tgcgcctaacggcctaacct

SEQ ID NO: 7455 - DNA, 20 bp, Artificial Sequence
  Description of Artificial Sequence:  Hypothetical Probe Sequence
tgcgcctaagccctcaagga

SEQ ID NO: 7456 - DNA, 20 bp, Artificial Sequence
  Description of Artificial Sequence:  Hypothetical Probe Sequence
tgcggatgttgagtgcgctt

SEQ ID NO: 7457 - DNA, 20 bp, Artificial Sequence
  Description of Artificial Sequence:  Hypothetical Probe Sequence
tgcggatgtgatgcttccat

SEQ ID NO: 7458 - DNA, 20 bp, Artificial Sequence
  Description of Artificial Sequence:  Hypothetical Probe Sequence
tgcggatgtgtccgttaaag

SEQ ID NO: 7459 - DNA, 20 bp, Artificial Sequence
  Description of Artificial Sequence:  Hypothetical Probe Sequence
tgcggatgcgttgatgcagc

SEQ ID NO: 7460 - DNA, 20 bp, Artificial Sequence
  Description of Artificial Sequence:  Hypothetical Probe Sequence
tgcggatgctcaatacgtct

SEQ ID NO: 7461 - DNA, 20 bp, Artificial Sequence
  Description of Artificial Sequence:  Hypothetical Probe Sequence
tgcggatgctgtgatggcaa

SEQ ID NO: 7462 - DNA, 20 bp, Artificial Sequence
  Description of Artificial Sequence:  Hypothetical Probe Sequence
tgcggatggcaaagtgagga

SEQ ID NO: 7463 - DNA, 20 bp, Artificial Sequence
  Description of Artificial Sequence:  Hypothetical Probe Sequence
tgcggatgcctatcgtcgtt

SEQ ID NO: 7464 - DNA, 20 bp, Artificial Sequence
  Description of Artificial Sequence:  Hypothetical Probe Sequence
tgcggatgcacgcgttggac

SEQ ID NO: 7465 - DNA, 20 bp, Artificial Sequence
  Description of Artificial Sequence:  Hypothetical Probe Sequence
tgcggatggtgccgaacttg

SEQ ID NO: 7466 - DNA, 20 bp, Artificial Sequence
  Description of Artificial Sequence:  Hypothetical Probe Sequence
tgcggatgggacttgacagc

SEQ ID NO: 7467 - DNA, 20 bp, Artificial Sequence
  Description of Artificial Sequence:  Hypothetical Probe Sequence
tgcggatgacggtgtcaatc

SEQ ID NO: 7468 - DNA, 20 bp, Artificial Sequence
  Description of Artificial Sequence:  Hypothetical Probe Sequence
tgcgtcccaatctctgacct

SEQ ID NO: 7469 - DNA, 20 bp, Artificial Sequence
  Description of Artificial Sequence:  Hypothetical Probe Sequence
tgcgtcccaaagcttggcaa

SEQ ID NO: 7470 - DNA, 20 bp, Artificial Sequence
  Description of Artificial Sequence:  Hypothetical Probe Sequence
tgcgtccctcgtaaaggtct

SEQ ID NO: 7471 - DNA, 20 bp, Artificial Sequence
  Description of Artificial Sequence:  Hypothetical Probe Sequence
tgcgtccccttgcttgaatc

SEQ ID NO: 7472 - DNA, 20 bp, Artificial Sequence
  Description of Artificial Sequence:  Hypothetical Probe Sequence
tgcgtccccgttgatggctt

SEQ ID NO: 7473 - DNA, 20 bp, Artificial Sequence
  Description of Artificial Sequence:  Hypothetical Probe Sequence
tgcgtcccccataatcaatc

SEQ ID NO: 7474 - DNA, 20 bp, Artificial Sequence
  Description of Artificial Sequence:  Hypothetical Probe Sequence
tgcgtccccgaaccatacct

SEQ ID NO: 7475 - DNA, 20 bp, Artificial Sequence
  Description of Artificial Sequence:  Hypothetical Probe Sequence
tgcgtcccggtaatacagga

SEQ ID NO: 7476 - DNA, 20 bp, Artificial Sequence
  Description of Artificial Sequence:  Hypothetical Probe Sequence
tgcgtcccgtctgagttgtc

SEQ ID NO: 7477 - DNA, 20 bp, Artificial Sequence
  Description of Artificial Sequence:  Hypothetical Probe Sequence
tgcgtcccacctatcgctgt

SEQ ID NO: 7478 - DNA, 20 bp, Artificial Sequence
  Description of Artificial Sequence:  Hypothetical Probe Sequence
tgcgtccctccctcccagtg

SEQ ID NO: 7479 - DNA, 20 bp, Artificial Sequence
  Description of Artificial Sequence:  Hypothetical Probe Sequence
tgcgtcccggacctcaagtg

SEQ ID NO: 7480 - DNA, 20 bp, Artificial Sequence
  Description of Artificial Sequence:  Hypothetical Probe Sequence
tgcgtcccacggaggaaatc

SEQ ID NO: 7481 - DNA, 20 bp, Artificial Sequence
  Description of Artificial Sequence:  Hypothetical Probe Sequence
tgcgtgcgataccttgccta

SEQ ID NO: 7482 - DNA, 20 bp, Artificial Sequence
  Description of Artificial Sequence:  Hypothetical Probe Sequence
tgcgtgcgtctgatacggac

SEQ ID NO: 7483 - DNA, 20 bp, Artificial Sequence
  Description of Artificial Sequence:  Hypothetical Probe Sequence
tgcgtgcgtgtcctcacagc

SEQ ID NO: 7484 - DNA, 20 bp, Artificial Sequence
  Description of Artificial Sequence:  Hypothetical Probe Sequence
tgcgtgcgtcgtcagctgtc

SEQ ID NO: 7485 - DNA, 20 bp, Artificial Sequence
  Description of Artificial Sequence:  Hypothetical Probe Sequence
tgcgtgcggcttagtggcaa

SEQ ID NO: 7486 - DNA, 20 bp, Artificial Sequence
  Description of Artificial Sequence:  Hypothetical Probe Sequence
tgcgtgcggagtcctacgtt

SEQ ID NO: 7487 - DNA, 20 bp, Artificial Sequence
  Description of Artificial Sequence:  Hypothetical Probe Sequence
tgcgtgcgatcgcgtttgtc

SEQ ID NO: 7488 - DNA, 20 bp, Artificial Sequence
  Description of Artificial Sequence:  Hypothetical Probe Sequence
tgcgtgcgcctaccatcttg

SEQ ID NO: 7489 - DNA, 20 bp, Artificial Sequence
  Description of Artificial Sequence:  Hypothetical Probe Sequence
tgcgtgcgtcccgctttgtc

SEQ ID NO: 7490 - DNA, 20 bp, Artificial Sequence
  Description of Artificial Sequence:  Hypothetical Probe Sequence
tgcgcacgttgaaaagagga

SEQ ID NO: 7491 - DNA, 20 bp, Artificial Sequence
  Description of Artificial Sequence:  Hypothetical Probe Sequence
tgcgcacgttagcgttacgg

SEQ ID NO: 7492 - DNA, 20 bp, Artificial Sequence
  Description of Artificial Sequence:  Hypothetical Probe Sequence
tgcgcacgaaagacctagcc

SEQ ID NO: 7493 - DNA, 20 bp, Artificial Sequence
  Description of Artificial Sequence:  Hypothetical Probe Sequence
tgcgcacgtcgtcacggacc

SEQ ID NO: 7494 - DNA, 20 bp, Artificial Sequence
  Description of Artificial Sequence:  Hypothetical Probe Sequence
tgcgcacgctgtccatcacg

SEQ ID NO: 7495 - DNA, 20 bp, Artificial Sequence
  Description of Artificial Sequence:  Hypothetical Probe Sequence
tgcgcacggtctaatcgtgc

SEQ ID NO: 7496 - DNA, 20 bp, Artificial Sequence
  Description of Artificial Sequence:  Hypothetical Probe Sequence
tgcgcacgcctattaggagt

SEQ ID NO: 7497 - DNA, 20 bp, Artificial Sequence
  Description of Artificial Sequence:  Hypothetical Probe Sequence
tgcgcacggatgctgttctg

SEQ ID NO: 7498 - DNA, 20 bp, Artificial Sequence
  Description of Artificial Sequence:  Hypothetical Probe Sequence
tgcgcacgtcccaccttcgt

SEQ ID NO: 7499 - DNA, 20 bp, Artificial Sequence
  Description of Artificial Sequence:  Hypothetical Probe Sequence
tgcgcacggaccagtgtcgt

SEQ ID NO: 7500 - DNA, 20 bp, Artificial Sequence
  Description of Artificial Sequence:  Hypothetical Probe Sequence
tgcgcacgggactcgtggta

SEQ ID NO: 7501 - DNA, 20 bp, Artificial Sequence
  Description of Artificial Sequence:  Hypothetical Probe Sequence
tgcgcacgagccgtctagga

SEQ ID NO: 7502 - DNA, 20 bp, Artificial Sequence
  Description of Artificial Sequence:  Hypothetical Probe Sequence
tgcgcagcttgacagcagga

SEQ ID NO: 7503 - DNA, 20 bp, Artificial Sequence
  Description of Artificial Sequence:  Hypothetical Probe Sequence
tgcgcagctgatttagcgaa

SEQ ID NO: 7504 - DNA, 20 bp, Artificial Sequence
  Description of Artificial Sequence:  Hypothetical Probe Sequence
tgcgcagcttaggcttaatc

SEQ ID NO: 7505 - DNA, 20 bp, Artificial Sequence
  Description of Artificial Sequence:  Hypothetical Probe Sequence
tgcgcagcatactctgcagc

SEQ ID NO: 7506 - DNA, 20 bp, Artificial Sequence
  Description of Artificial Sequence:  Hypothetical Probe Sequence
tgcgcagctcgtgtctcagc

SEQ ID NO: 7507 - DNA, 20 bp, Artificial Sequence
  Description of Artificial Sequence:  Hypothetical Probe Sequence
tgcgcagcccatttaggctt

SEQ ID NO: 7508 - DNA, 20 bp, Artificial Sequence
  Description of Artificial Sequence:  Hypothetical Probe Sequence
tgcgcagcggtactcaacgg

SEQ ID NO: 7509 - DNA, 20 bp, Artificial Sequence
  Description of Artificial Sequence:  Hypothetical Probe Sequence
tgcgcagcgagtgcaaatac

SEQ ID NO: 7510 - DNA, 20 bp, Artificial Sequence
  Description of Artificial Sequence:  Hypothetical Probe Sequence
tgcgcagcatcgttagggta

SEQ ID NO: 7511 - DNA, 20 bp, Artificial Sequence
  Description of Artificial Sequence:  Hypothetical Probe Sequence
tgcgcagccctagatgtcgt

SEQ ID NO: 7512 - DNA, 20 bp, Artificial Sequence
  Description of Artificial Sequence:  Hypothetical Probe Sequence
tgcgcagcgatgataccacg

SEQ ID NO: 7513 - DNA, 20 bp, Artificial Sequence
  Description of Artificial Sequence:  Hypothetical Probe Sequence
tgcgcagccagccagcccta

SEQ ID NO: 7514 - DNA, 20 bp, Artificial Sequence
  Description of Artificial Sequence:  Hypothetical Probe Sequence
tgcgcagcgaccaaagaaag

SEQ ID NO: 7515 - DNA, 20 bp, Artificial Sequence
  Description of Artificial Sequence:  Hypothetical Probe Sequence
tgcgcagcagcctcgttctg

SEQ ID NO: 7516 - DNA, 20 bp, Artificial Sequence
  Description of Artificial Sequence:  Hypothetical Probe Sequence
tgcggacctgatcgaatgtc

SEQ ID NO: 7517 - DNA, 20 bp, Artificial Sequence
  Description of Artificial Sequence:  Hypothetical Probe Sequence
tgcggaccaatcaggagacc

SEQ ID NO: 7518 - DNA, 20 bp, Artificial Sequence
  Description of Artificial Sequence:  Hypothetical Probe Sequence
tgcggaccatacaatctgcg

SEQ ID NO: 7519 - DNA, 20 bp, Artificial Sequence
  Description of Artificial Sequence:  Hypothetical Probe Sequence
tgcggacctacactgttccc

SEQ ID NO: 7520 - DNA, 20 bp, Artificial Sequence
  Description of Artificial Sequence:  Hypothetical Probe Sequence
tgcggacctgtctgatacgg

SEQ ID NO: 7521 - DNA, 20 bp, Artificial Sequence
  Description of Artificial Sequence:  Hypothetical Probe Sequence
tgcggacccgttgcaattag

SEQ ID NO: 7522 - DNA, 20 bp, Artificial Sequence
  Description of Artificial Sequence:  Hypothetical Probe Sequence
tgcggaccccatctgttctg

SEQ ID NO: 7523 - DNA, 20 bp, Artificial Sequence
  Description of Artificial Sequence:  Hypothetical Probe Sequence
tgcggacccgaacttgatcg

SEQ ID NO: 7524 - DNA, 20 bp, Artificial Sequence
  Description of Artificial Sequence:  Hypothetical Probe Sequence
tgcggaccgagtccatgtgc

SEQ ID NO: 7525 - DNA, 20 bp, Artificial Sequence
  Description of Artificial Sequence:  Hypothetical Probe Sequence
tgcggaccaggaaaaggtct

SEQ ID NO: 7526 - DNA, 20 bp, Artificial Sequence
  Description of Artificial Sequence:  Hypothetical Probe Sequence
tgcggaccgatgtgtcagtg

SEQ ID NO: 7527 - DNA, 20 bp, Artificial Sequence
  Description of Artificial Sequence:  Hypothetical Probe Sequence
tgcggacccagctcgtcttg

SEQ ID NO: 7528 - DNA, 20 bp, Artificial Sequence
  Description of Artificial Sequence:  Hypothetical Probe Sequence
tgcggaccgaccggtagcaa

SEQ ID NO: 7529 - DNA, 20 bp, Artificial Sequence
  Description of Artificial Sequence:  Hypothetical Probe Sequence
tgcggaccacggaaagccat

SEQ ID NO: 7530 - DNA, 20 bp, Artificial Sequence
  Description of Artificial Sequence:  Hypothetical Probe Sequence
tgcggtgcaatcacggccta

SEQ ID NO: 7531 - DNA, 20 bp, Artificial Sequence
  Description of Artificial Sequence:  Hypothetical Probe Sequence
tgcggtgcaaagcgttcacg

SEQ ID NO: 7532 - DNA, 20 bp, Artificial Sequence
  Description of Artificial Sequence:  Hypothetical Probe Sequence
tgcggtgctgtccctatccc

SEQ ID NO: 7533 - DNA, 20 bp, Artificial Sequence
  Description of Artificial Sequence:  Hypothetical Probe Sequence
tgcggtgccgttatcgaaag

SEQ ID NO: 7534 - DNA, 20 bp, Artificial Sequence
  Description of Artificial Sequence:  Hypothetical Probe Sequence
tgcggtgcacctccatccat

SEQ ID NO: 7535 - DNA, 20 bp, Artificial Sequence
  Description of Artificial Sequence:  Hypothetical Probe Sequence
tgcggtgctcccctgtacgg

SEQ ID NO: 7536 - DNA, 20 bp, Artificial Sequence
  Description of Artificial Sequence:  Hypothetical Probe Sequence
tgcggtgcagcccctaccat

SEQ ID NO: 7537 - DNA, 20 bp, Artificial Sequence
  Description of Artificial Sequence:  Hypothetical Probe Sequence
tgcgggacttgagtctgtgc

SEQ ID NO: 7538 - DNA, 20 bp, Artificial Sequence
  Description of Artificial Sequence:  Hypothetical Probe Sequence
tgcgggactgatttgacagc

SEQ ID NO: 7539 - DNA, 20 bp, Artificial Sequence
  Description of Artificial Sequence:  Hypothetical Probe Sequence
tgcgggacatacgcttagcc

SEQ ID NO: 7540 - DNA, 20 bp, Artificial Sequence
  Description of Artificial Sequence:  Hypothetical Probe Sequence
tgcgggacaaagttagcgtt

SEQ ID NO: 7541 - DNA, 20 bp, Artificial Sequence
  Description of Artificial Sequence:  Hypothetical Probe Sequence
tgcgggactgtctctgagcc

SEQ ID NO: 7542 - DNA, 20 bp, Artificial Sequence
  Description of Artificial Sequence:  Hypothetical Probe Sequence
tgcgggaccttgttaggagt

SEQ ID NO: 7543 - DNA, 20 bp, Artificial Sequence
  Description of Artificial Sequence:  Hypothetical Probe Sequence
tgcgggaccgttggtatccc

SEQ ID NO: 7544 - DNA, 20 bp, Artificial Sequence
  Description of Artificial Sequence:  Hypothetical Probe Sequence
tgcgggacctcagaccacct

SEQ ID NO: 7545 - DNA, 20 bp, Artificial Sequence
  Description of Artificial Sequence:  Hypothetical Probe Sequence
tgcgggacctgtaatccgtt

SEQ ID NO: 7546 - DNA, 20 bp, Artificial Sequence
  Description of Artificial Sequence:  Hypothetical Probe Sequence
tgcgggaccgaacgttctca

SEQ ID NO: 7547 - DNA, 20 bp, Artificial Sequence
  Description of Artificial Sequence:  Hypothetical Probe Sequence
tgcgggacgcttgcttatac

SEQ ID NO: 7548 - DNA, 20 bp, Artificial Sequence
  Description of Artificial Sequence:  Hypothetical Probe Sequence
tgcgggacgtctacctgctt

SEQ ID NO: 7549 - DNA, 20 bp, Artificial Sequence
  Description of Artificial Sequence:  Hypothetical Probe Sequence
tgcgggacagtgacggacct

SEQ ID NO: 7550 - DNA, 20 bp, Artificial Sequence
  Description of Artificial Sequence:  Hypothetical Probe Sequence
tgcgggacatcgctcatcgt

SEQ ID NO: 7551 - DNA, 20 bp, Artificial Sequence
  Description of Artificial Sequence:  Hypothetical Probe Sequence
tgcgggaccctatacagcaa

SEQ ID NO: 7552 - DNA, 20 bp, Artificial Sequence
  Description of Artificial Sequence:  Hypothetical Probe Sequence
tgcgggacgatggtgcgatg

SEQ ID NO: 7553 - DNA, 20 bp, Artificial Sequence
  Description of Artificial Sequence:  Hypothetical Probe Sequence
tgcgggactgcgtgtcccat

SEQ ID NO: 7554 - DNA, 20 bp, Artificial Sequence
  Description of Artificial Sequence:  Hypothetical Probe Sequence
tgcgggacagccatacgcaa

SEQ ID NO: 7555 - DNA, 20 bp, Artificial Sequence
  Description of Artificial Sequence:  Hypothetical Probe Sequence
tgcgacggttaggctttctg

SEQ ID NO: 7556 - DNA, 20 bp, Artificial Sequence
  Description of Artificial Sequence:  Hypothetical Probe Sequence
tgcgacggaatcaatcatcg

SEQ ID NO: 7557 - DNA, 20 bp, Artificial Sequence
  Description of Artificial Sequence:  Hypothetical Probe Sequence
tgcgacggtctgcgaattag

SEQ ID NO: 7558 - DNA, 20 bp, Artificial Sequence
  Description of Artificial Sequence:  Hypothetical Probe Sequence
tgcgacggctcattgaagtg

SEQ ID NO: 7559 - DNA, 20 bp, Artificial Sequence
  Description of Artificial Sequence:  Hypothetical Probe Sequence
tgcgacggctgtccatacct

SEQ ID NO: 7560 - DNA, 20 bp, Artificial Sequence
  Description of Artificial Sequence:  Hypothetical Probe Sequence
tgcgacgggtctcttggagt

SEQ ID NO: 7561 - DNA, 20 bp, Artificial Sequence
  Description of Artificial Sequence:  Hypothetical Probe Sequence
tgcgacgggagtcgttaaag

SEQ ID NO: 7562 - DNA, 20 bp, Artificial Sequence
  Description of Artificial Sequence:  Hypothetical Probe Sequence
tgcgacggagtgacctcacg

SEQ ID NO: 7563 - DNA, 20 bp, Artificial Sequence
  Description of Artificial Sequence:  Hypothetical Probe Sequence
tgcgacggaggatgtcggac

SEQ ID NO: 7564 - DNA, 20 bp, Artificial Sequence
  Description of Artificial Sequence:  Hypothetical Probe Sequence
tgcgacgggatggtgctgtc

SEQ ID NO: 7565 - DNA, 20 bp, Artificial Sequence
  Description of Artificial Sequence:  Hypothetical Probe Sequence
tgcgacgggtgcggtaagga

SEQ ID NO: 7566 - DNA, 20 bp, Artificial Sequence
  Description of Artificial Sequence:  Hypothetical Probe Sequence
tgcgacggggacgcttagcc

SEQ ID NO: 7567 - DNA, 20 bp, Artificial Sequence
  Description of Artificial Sequence:  Hypothetical Probe Sequence
tgcgagccttgatgtctctg

SEQ ID NO: 7568 - DNA, 20 bp, Artificial Sequence
  Description of Artificial Sequence:  Hypothetical Probe Sequence
tgcgagcctgattctggcaa

SEQ ID NO: 7569 - DNA, 20 bp, Artificial Sequence
  Description of Artificial Sequence:  Hypothetical Probe Sequence
tgcgagccttaggcaatctg

SEQ ID NO: 7570 - DNA, 20 bp, Artificial Sequence
  Description of Artificial Sequence:  Hypothetical Probe Sequence
tgcgagccaaagggacatac

SEQ ID NO: 7571 - DNA, 20 bp, Artificial Sequence
  Description of Artificial Sequence:  Hypothetical Probe Sequence
tgcgagcctacaaaaggtgc

SEQ ID NO: 7572 - DNA, 20 bp, Artificial Sequence
  Description of Artificial Sequence:  Hypothetical Probe Sequence
tgcgagcctgtcgacctaca

SEQ ID NO: 7573 - DNA, 20 bp, Artificial Sequence
  Description of Artificial Sequence:  Hypothetical Probe Sequence
tgcgagccctcaggtaggac

SEQ ID NO: 7574 - DNA, 20 bp, Artificial Sequence
  Description of Artificial Sequence:  Hypothetical Probe Sequence
tgcgagccccatggtaagcc

SEQ ID NO: 7575 - DNA, 20 bp, Artificial Sequence
  Description of Artificial Sequence:  Hypothetical Probe Sequence
tgcgagccggtatgtcagcc

SEQ ID NO: 7576 - DNA, 20 bp, Artificial Sequence
  Description of Artificial Sequence:  Hypothetical Probe Sequence
tgcgagccaggagatgcgaa

SEQ ID NO: 7577 - DNA, 20 bp, Artificial Sequence
  Description of Artificial Sequence:  Hypothetical Probe Sequence
tgcgagcccctatctgagcc

SEQ ID NO: 7578 - DNA, 20 bp, Artificial Sequence
  Description of Artificial Sequence:  Hypothetical Probe Sequence
tgcgagcctcccgcttgatg

SEQ ID NO: 7579 - DNA, 20 bp, Artificial Sequence
  Description of Artificial Sequence:  Hypothetical Probe Sequence
tgcgagcccacgtgtcgctt

SEQ ID NO: 7580 - DNA, 20 bp, Artificial Sequence
  Description of Artificial Sequence:  Hypothetical Probe Sequence
tgcgagcccagccagcgtct

SEQ ID NO: 7581 - DNA, 20 bp, Artificial Sequence
  Description of Artificial Sequence:  Hypothetical Probe Sequence
tgcgagccggactcgtgctt

SEQ ID NO: 7582 - DNA, 20 bp, Artificial Sequence
  Description of Artificial Sequence:  Hypothetical Probe Sequence
tgcgagccacggcagctgat

SEQ ID NO: 7583 - DNA, 20 bp, Artificial Sequence
  Description of Artificial Sequence:  Hypothetical Probe Sequence
tgcgagccagccgatgggta

SEQ ID NO: 7584 - DNA, 20 bp, Artificial Sequence
  Description of Artificial Sequence:  Hypothetical Probe Sequence
cacgttgaccattgcgccat

SEQ ID NO: 7585 - DNA, 20 bp, Artificial Sequence
  Description of Artificial Sequence:  Hypothetical Probe Sequence
ttgagcaaacggaaagtgcg

SEQ ID NO: 7586 - DNA, 20 bp, Artificial Sequence
  Description of Artificial Sequence:  Hypothetical Probe Sequence
ttgaatcgcacggaccctca

SEQ ID NO: 7587 - DNA, 20 bp, Artificial Sequence
  Description of Artificial Sequence:  Hypothetical Probe Sequence
tgattcgtgtgccgttcgaa

SEQ ID NO: 7588 - DNA, 20 bp, Artificial Sequence
  Description of Artificial Sequence:  Hypothetical Probe Sequence
cacgtgattcccaatcgcaa

SEQ ID NO: 7589 - DNA, 20 bp, Artificial Sequence
  Description of Artificial Sequence:  Hypothetical Probe Sequence
tgatgtgcccattccccgaa

SEQ ID NO: 7590 - DNA, 20 bp, Artificial Sequence
  Description of Artificial Sequence:  Hypothetical Probe Sequence
ttagcacggcaaagtggctt

SEQ ID NO: 7591 - DNA, 20 bp, Artificial Sequence
  Description of Artificial Sequence:  Hypothetical Probe Sequence
cacgaatccacggaccacgg

SEQ ID NO: 7592 - DNA, 20 bp, Artificial Sequence
  Description of Artificial Sequence:  Hypothetical Probe Sequence
atacgcaaaaagacgggcaa

SEQ ID NO: 7593 - DNA, 20 bp, Artificial Sequence
  Description of Artificial Sequence:  Hypothetical Probe Sequence
atactgcgtctgacggcgaa

SEQ ID NO: 7594 - DNA, 20 bp, Artificial Sequence
  Description of Artificial Sequence:  Hypothetical Probe Sequence
cacgatacacggacggagga

SEQ ID NO: 7595 - DNA, 20 bp, Artificial Sequence
  Description of Artificial Sequence:  Hypothetical Probe Sequence
cacgaaagctgtggaccgaa

SEQ ID NO: 7596 - DNA, 20 bp, Artificial Sequence
  Description of Artificial Sequence:  Hypothetical Probe Sequence
aaagggtaatcgcttgtgcg

SEQ ID NO: 7597 - DNA, 20 bp, Artificial Sequence
  Description of Artificial Sequence:  Hypothetical Probe Sequence
aaagcctaagtgcacgcagc

SEQ ID NO: 7598 - DNA, 20 bp, Artificial Sequence
  Description of Artificial Sequence:  Hypothetical Probe Sequence
aaagtgcgatacaccttgcg

SEQ ID NO: 7599 - DNA, 20 bp, Artificial Sequence
  Description of Artificial Sequence:  Hypothetical Probe Sequence
cacgaaaggtgcaaagagcc

SEQ ID NO: 7600 - DNA, 20 bp, Artificial Sequence
  Description of Artificial Sequence:  Hypothetical Probe Sequence
aaagggacacctgtgctgcg

SEQ ID NO: 7601 - DNA, 20 bp, Artificial Sequence
  Description of Artificial Sequence:  Hypothetical Probe Sequence
tctgcgttatactgcggctt

SEQ ID NO: 7602 - DNA, 20 bp, Artificial Sequence
  Description of Artificial Sequence:  Hypothetical Probe Sequence
tctgtgcgtgatacgggtgc

SEQ ID NO: 7603 - DNA, 20 bp, Artificial Sequence
  Description of Artificial Sequence:  Hypothetical Probe Sequence
tctgcacggcttaaagcacg

SEQ ID NO: 7604 - DNA, 20 bp, Artificial Sequence
  Description of Artificial Sequence:  Hypothetical Probe Sequence
cacgtctgcagcatcgacct

SEQ ID NO: 7605 - DNA, 20 bp, Artificial Sequence
  Description of Artificial Sequence:  Hypothetical Probe Sequence
tctggacccttggacctgcg

SEQ ID NO: 7606 - DNA, 20 bp, Artificial Sequence
  Description of Artificial Sequence:  Hypothetical Probe Sequence
tgtccgttaggagcaatccc

SEQ ID NO: 7607 - DNA, 20 bp, Artificial Sequence
  Description of Artificial Sequence:  Hypothetical Probe Sequence
tgtcgaccgatggaccggac

SEQ ID NO: 7608 - DNA, 20 bp, Artificial Sequence
  Description of Artificial Sequence:  Hypothetical Probe Sequence
cacgtgtcagccgatggcaa

SEQ ID NO: 7609 - DNA, 20 bp, Artificial Sequence
  Description of Artificial Sequence:  Hypothetical Probe Sequence
tcgttctgcgttacggacgg

SEQ ID NO: 7610 - DNA, 20 bp, Artificial Sequence
  Description of Artificial Sequence:  Hypothetical Probe Sequence
cacgtcgttcgtccatcgaa

SEQ ID NO: 7611 - DNA, 20 bp, Artificial Sequence
  Description of Artificial Sequence:  Hypothetical Probe Sequence
tcgtccataaagagcccacg

SEQ ID NO: 7612 - DNA, 20 bp, Artificial Sequence
  Description of Artificial Sequence:  Hypothetical Probe Sequence
tcgtacctgtcttgcgagcc

SEQ ID NO: 7613 - DNA, 20 bp, Artificial Sequence
  Description of Artificial Sequence:  Hypothetical Probe Sequence
tcgtggacgcaagatgcacg

SEQ ID NO: 7614 - DNA, 20 bp, Artificial Sequence
  Description of Artificial Sequence:  Hypothetical Probe Sequence
cacgcttgtgtcggaccgaa

SEQ ID NO: 7615 - DNA, 20 bp, Artificial Sequence
  Description of Artificial Sequence:  Hypothetical Probe Sequence
cacgcttgagtgagtggtgc

SEQ ID NO: 7616 - DNA, 20 bp, Artificial Sequence
  Description of Artificial Sequence:  Hypothetical Probe Sequence
cacgcttgacctcgttagcc

SEQ ID NO: 7617 - DNA, 20 bp, Artificial Sequence
  Description of Artificial Sequence:  Hypothetical Probe Sequence
cacgcttgtccctcgttgat

SEQ ID NO: 7618 - DNA, 20 bp, Artificial Sequence
  Description of Artificial Sequence:  Hypothetical Probe Sequence
cacgcttgagcctctgacct

SEQ ID NO: 7619 - DNA, 20 bp, Artificial Sequence
  Description of Artificial Sequence:  Hypothetical Probe Sequence
cacgcgtttacaaggacacg

SEQ ID NO: 7620 - DNA, 20 bp, Artificial Sequence
  Description of Artificial Sequence:  Hypothetical Probe Sequence
cacgcgtttgtcgcttaatc

SEQ ID NO: 7621 - DNA, 20 bp, Artificial Sequence
  Description of Artificial Sequence:  Hypothetical Probe Sequence
cacgcgtttcgtgatgcgaa

SEQ ID NO: 7622 - DNA, 20 bp, Artificial Sequence
  Description of Artificial Sequence:  Hypothetical Probe Sequence
cacgcgttcttgcgttcgtt

SEQ ID NO: 7623 - DNA, 20 bp, Artificial Sequence
  Description of Artificial Sequence:  Hypothetical Probe Sequence
cacgcgttcgaagtgcgtct

SEQ ID NO: 7624 - DNA, 20 bp, Artificial Sequence
  Description of Artificial Sequence:  Hypothetical Probe Sequence
cacgcgttgtctttagtgcg

SEQ ID NO: 7625 - DNA, 20 bp, Artificial Sequence
  Description of Artificial Sequence:  Hypothetical Probe Sequence
cacgcgttgcaagcaatgtc

SEQ ID NO: 7626 - DNA, 20 bp, Artificial Sequence
  Description of Artificial Sequence:  Hypothetical Probe Sequence
cacgcgttcctatgatgacc

SEQ ID NO: 7627 - DNA, 20 bp, Artificial Sequence
  Description of Artificial Sequence:  Hypothetical Probe Sequence
cacgcgttgatgctcaagga

SEQ ID NO: 7628 - DNA, 20 bp, Artificial Sequence
  Description of Artificial Sequence:  Hypothetical Probe Sequence
cacgcgtttccctgatagcc

SEQ ID NO: 7629 - DNA, 20 bp, Artificial Sequence
  Description of Artificial Sequence:  Hypothetical Probe Sequence
cacgcgttagcccacgtccc

SEQ ID NO: 7630 - DNA, 20 bp, Artificial Sequence
  Description of Artificial Sequence:  Hypothetical Probe Sequence
cacgctcaaatcagcccacg

SEQ ID NO: 7631 - DNA, 20 bp, Artificial Sequence
  Description of Artificial Sequence:  Hypothetical Probe Sequence
cacgctcacgaaaaagccat

SEQ ID NO: 7632 - DNA, 20 bp, Artificial Sequence
  Description of Artificial Sequence:  Hypothetical Probe Sequence
cacgctcaggtaatcgatcg

SEQ ID NO: 7633 - DNA, 20 bp, Artificial Sequence
  Description of Artificial Sequence:  Hypothetical Probe Sequence
cacgctcatcccccatccat

SEQ ID NO: 7634 - DNA, 20 bp, Artificial Sequence
  Description of Artificial Sequence:  Hypothetical Probe Sequence
cacgctgtatcgacctcagc

SEQ ID NO: 7635 - DNA, 20 bp, Artificial Sequence
  Description of Artificial Sequence:  Hypothetical Probe Sequence
cacgctgttgcgctcaagga

SEQ ID NO: 7636 - DNA, 20 bp, Artificial Sequence
  Description of Artificial Sequence:  Hypothetical Probe Sequence
ccattacaacctcagctgcg

SEQ ID NO: 7637 - DNA, 20 bp, Artificial Sequence
  Description of Artificial Sequence:  Hypothetical Probe Sequence
cacgccattctgcttggtgc

SEQ ID NO: 7638 - DNA, 20 bp, Artificial Sequence
  Description of Artificial Sequence:  Hypothetical Probe Sequence
cacgccattcgttctgggac

SEQ ID NO: 7639 - DNA, 20 bp, Artificial Sequence
  Description of Artificial Sequence:  Hypothetical Probe Sequence
cacgccatcttgaatccacg

SEQ ID NO: 7640 - DNA, 20 bp, Artificial Sequence
  Description of Artificial Sequence:  Hypothetical Probe Sequence
cacgccatccatcgttggta

SEQ ID NO: 7641 - DNA, 20 bp, Artificial Sequence
  Description of Artificial Sequence:  Hypothetical Probe Sequence
cacgccatggtaaggaacgg

SEQ ID NO: 7642 - DNA, 20 bp, Artificial Sequence
  Description of Artificial Sequence:  Hypothetical Probe Sequence
ccatgtctcagctgtcgcaa

SEQ ID NO: 7643 - DNA, 20 bp, Artificial Sequence
  Description of Artificial Sequence:  Hypothetical Probe Sequence
cacgccatgagtgtgcgctt

SEQ ID NO: 7644 - DNA, 20 bp, Artificial Sequence
  Description of Artificial Sequence:  Hypothetical Probe Sequence
cacgccatagtgtgtctccc

SEQ ID NO: 7645 - DNA, 20 bp, Artificial Sequence
  Description of Artificial Sequence:  Hypothetical Probe Sequence
cacgccataggacgttacgg

SEQ ID NO: 7646 - DNA, 20 bp, Artificial Sequence
  Description of Artificial Sequence:  Hypothetical Probe Sequence
cacgccattgcggcttcagc

SEQ ID NO: 7647 - DNA, 20 bp, Artificial Sequence
  Description of Artificial Sequence:  Hypothetical Probe Sequence
cacgccatcacgctcaggac

SEQ ID NO: 7648 - DNA, 20 bp, Artificial Sequence
  Description of Artificial Sequence:  Hypothetical Probe Sequence
cacgccatgacctacatgcg

SEQ ID NO: 7649 - DNA, 20 bp, Artificial Sequence
  Description of Artificial Sequence:  Hypothetical Probe Sequence
cacgccatacggagtgagcc

SEQ ID NO: 7650 - DNA, 20 bp, Artificial Sequence
  Description of Artificial Sequence:  Hypothetical Probe Sequence
cacgcgaattgacgttgctt

SEQ ID NO: 7651 - DNA, 20 bp, Artificial Sequence
  Description of Artificial Sequence:  Hypothetical Probe Sequence
cacgcgaaaatcgagtcacg

SEQ ID NO: 7652 - DNA, 20 bp, Artificial Sequence
  Description of Artificial Sequence:  Hypothetical Probe Sequence
cacgcgaatctgaatccttg

SEQ ID NO: 7653 - DNA, 20 bp, Artificial Sequence
  Description of Artificial Sequence:  Hypothetical Probe Sequence
cacgcgaacttgttgaggac

SEQ ID NO: 7654 - DNA, 20 bp, Artificial Sequence
  Description of Artificial Sequence:  Hypothetical Probe Sequence
cacgcgaactgtcagcccta

SEQ ID NO: 7655 - DNA, 20 bp, Artificial Sequence
  Description of Artificial Sequence:  Hypothetical Probe Sequence
cacgcgaagcttccattcgt

SEQ ID NO: 7656 - DNA, 20 bp, Artificial Sequence
  Description of Artificial Sequence:  Hypothetical Probe Sequence
cacgcgaaggtactcatccc

SEQ ID NO: 7657 - DNA, 20 bp, Artificial Sequence
  Description of Artificial Sequence:  Hypothetical Probe Sequence
cacgcgaagtcttcccgatg

SEQ ID NO: 7658 - DNA, 20 bp, Artificial Sequence
  Description of Artificial Sequence:  Hypothetical Probe Sequence
cacgcgaagcaacgaaatac

SEQ ID NO: 7659 - DNA, 20 bp, Artificial Sequence
  Description of Artificial Sequence:  Hypothetical Probe Sequence
cacgcgaagatgttagagcc

SEQ ID NO: 7660 - DNA, 20 bp, Artificial Sequence
  Description of Artificial Sequence:  Hypothetical Probe Sequence
cacgcgaatcccggtacgaa

SEQ ID NO: 7661 - DNA, 20 bp, Artificial Sequence
  Description of Artificial Sequence:  Hypothetical Probe Sequence
cacgcgaatgcggatgcttg

SEQ ID NO: 7662 - DNA, 20 bp, Artificial Sequence
  Description of Artificial Sequence:  Hypothetical Probe Sequence
gcttttagtgatggactgcg

SEQ ID NO: 7663 - DNA, 20 bp, Artificial Sequence
  Description of Artificial Sequence:  Hypothetical Probe Sequence
cacggctttcgtgtctgctt

SEQ ID NO: 7664 - DNA, 20 bp, Artificial Sequence
  Description of Artificial Sequence:  Hypothetical Probe Sequence
cacggcttgcaagcaactgt

SEQ ID NO: 7665 - DNA, 20 bp, Artificial Sequence
  Description of Artificial Sequence:  Hypothetical Probe Sequence
cacggcttatcggtgcgctt

SEQ ID NO: 7666 - DNA, 20 bp, Artificial Sequence
  Description of Artificial Sequence:  Hypothetical Probe Sequence
cacggctttcccgtgcctgt

SEQ ID NO: 7667 - DNA, 20 bp, Artificial Sequence
  Description of Artificial Sequence:  Hypothetical Probe Sequence
cacggcttggacctgttgtc

SEQ ID NO: 7668 - DNA, 20 bp, Artificial Sequence
  Description of Artificial Sequence:  Hypothetical Probe Sequence
cacggcttagccccatagga

SEQ ID NO: 7669 - DNA, 20 bp, Artificial Sequence
  Description of Artificial Sequence:  Hypothetical Probe Sequence
ggtatgatcagcgatgcacg

SEQ ID NO: 7670 - DNA, 20 bp, Artificial Sequence
  Description of Artificial Sequence:  Hypothetical Probe Sequence
cacgggtatcgtgcttcagc

SEQ ID NO: 7671 - DNA, 20 bp, Artificial Sequence
  Description of Artificial Sequence:  Hypothetical Probe Sequence
ggtaccatgtctgtgcgtgc

SEQ ID NO: 7672 - DNA, 20 bp, Artificial Sequence
  Description of Artificial Sequence:  Hypothetical Probe Sequence
ggtagcttaaagtcccgtgc

SEQ ID NO: 7673 - DNA, 20 bp, Artificial Sequence
  Description of Artificial Sequence:  Hypothetical Probe Sequence
cacgggtagcaaagtgatcg

SEQ ID NO: 7674 - DNA, 20 bp, Artificial Sequence
  Description of Artificial Sequence:  Hypothetical Probe Sequence
cacgggtaaggacacgtcgt

SEQ ID NO: 7675 - DNA, 20 bp, Artificial Sequence
  Description of Artificial Sequence:  Hypothetical Probe Sequence
ggtagatgtgcgtccctgcg

SEQ ID NO: 7676 - DNA, 20 bp, Artificial Sequence
  Description of Artificial Sequence:  Hypothetical Probe Sequence
cacgggtagaccagccgcaa

SEQ ID NO: 7677 - DNA, 20 bp, Artificial Sequence
  Description of Artificial Sequence:  Hypothetical Probe Sequence
cacgggtaggacaaagggac

SEQ ID NO: 7678 - DNA, 20 bp, Artificial Sequence
  Description of Artificial Sequence:  Hypothetical Probe Sequence
cacggtcttgatcacggcaa

SEQ ID NO: 7679 - DNA, 20 bp, Artificial Sequence
  Description of Artificial Sequence:  Hypothetical Probe Sequence
cacggtcttctgtgcgccat

SEQ ID NO: 7680 - DNA, 20 bp, Artificial Sequence
  Description of Artificial Sequence:  Hypothetical Probe Sequence
cacggtctgcaaggtatccc

SEQ ID NO: 7681 - DNA, 20 bp, Artificial Sequence
  Description of Artificial Sequence:  Hypothetical Probe Sequence
cacggtcttgcgcacgacct

SEQ ID NO: 7682 - DNA, 20 bp, Artificial Sequence
  Description of Artificial Sequence:  Hypothetical Probe Sequence
cacggtctacggttgaagcc

SEQ ID NO: 7683 - DNA, 20 bp, Artificial Sequence
  Description of Artificial Sequence:  Hypothetical Probe Sequence
cacggagttgatcagctgcg

SEQ ID NO: 7684 - DNA, 20 bp, Artificial Sequence
  Description of Artificial Sequence:  Hypothetical Probe Sequence
cacggagttcgtttagcagc

SEQ ID NO: 7685 - DNA, 20 bp, Artificial Sequence
  Description of Artificial Sequence:  Hypothetical Probe Sequence
cacggagtgcttacggcacg

SEQ ID NO: 7686 - DNA, 20 bp, Artificial Sequence
  Description of Artificial Sequence:  Hypothetical Probe Sequence
cacggagtaggagaccgtgc

SEQ ID NO: 7687 - DNA, 20 bp, Artificial Sequence
  Description of Artificial Sequence:  Hypothetical Probe Sequence
cacggagtagccggaccagc

SEQ ID NO: 7688 - DNA, 20 bp, Artificial Sequence
  Description of Artificial Sequence:  Hypothetical Probe Sequence
cacggcaattgatctgccta

SEQ ID NO: 7689 - DNA, 20 bp, Artificial Sequence
  Description of Artificial Sequence:  Hypothetical Probe Sequence
cacggcaatgtcacggaaag

SEQ ID NO: 7690 - DNA, 20 bp, Artificial Sequence
  Description of Artificial Sequence:  Hypothetical Probe Sequence
cacggcaacttgaatcatcg

SEQ ID NO: 7691 - DNA, 20 bp, Artificial Sequence
  Description of Artificial Sequence:  Hypothetical Probe Sequence
cacggcaaggtactcagacc

SEQ ID NO: 7692 - DNA, 20 bp, Artificial Sequence
  Description of Artificial Sequence:  Hypothetical Probe Sequence
cacggcaacctaaggaatcg

SEQ ID NO: 7693 - DNA, 20 bp, Artificial Sequence
  Description of Artificial Sequence:  Hypothetical Probe Sequence
cacggcaagatgttgagacc

SEQ ID NO: 7694 - DNA, 20 bp, Artificial Sequence
  Description of Artificial Sequence:  Hypothetical Probe Sequence
cacggcaatccccctacgaa

SEQ ID NO: 7695 - DNA, 20 bp, Artificial Sequence
  Description of Artificial Sequence:  Hypothetical Probe Sequence
cacggcaatgcgtctgcacg

SEQ ID NO: 7696 - DNA, 20 bp, Artificial Sequence
  Description of Artificial Sequence:  Hypothetical Probe Sequence
cacggcaacacggtgcatcg

SEQ ID NO: 7697 - DNA, 20 bp, Artificial Sequence
  Description of Artificial Sequence:  Hypothetical Probe Sequence
cacgagtggcttatcgcgtt

SEQ ID NO: 7698 - DNA, 20 bp, Artificial Sequence
  Description of Artificial Sequence:  Hypothetical Probe Sequence
agtggatgaggatgcgcagc

SEQ ID NO: 7699 - DNA, 20 bp, Artificial Sequence
  Description of Artificial Sequence:  Hypothetical Probe Sequence
agtgtcccgcaaccattccc

SEQ ID NO: 7700 - DNA, 20 bp, Artificial Sequence
  Description of Artificial Sequence:  Hypothetical Probe Sequence
agtggaccaatccagccacg

SEQ ID NO: 7701 - DNA, 20 bp, Artificial Sequence
  Description of Artificial Sequence:  Hypothetical Probe Sequence
cacgaccttgatggaccgaa

SEQ ID NO: 7702 - DNA, 20 bp, Artificial Sequence
  Description of Artificial Sequence:  Hypothetical Probe Sequence
accttctgcgaaacggcagc

SEQ ID NO: 7703 - DNA, 20 bp, Artificial Sequence
  Description of Artificial Sequence:  Hypothetical Probe Sequence
cacgaccttcgtgcaaagcc

SEQ ID NO: 7704 - DNA, 20 bp, Artificial Sequence
  Description of Artificial Sequence:  Hypothetical Probe Sequence
acctccatatcggaccgtgc

SEQ ID NO: 7705 - DNA, 20 bp, Artificial Sequence
  Description of Artificial Sequence:  Hypothetical Probe Sequence
cacgacctatcgtgcgtgcg

SEQ ID NO: 7706 - DNA, 20 bp, Artificial Sequence
  Description of Artificial Sequence:  Hypothetical Probe Sequence
cacgacctgatgtgcggacc

SEQ ID NO: 7707 - DNA, 20 bp, Artificial Sequence
  Description of Artificial Sequence:  Hypothetical Probe Sequence
acctggacggtacacgcagc

SEQ ID NO: 7708 - DNA, 20 bp, Artificial Sequence
  Description of Artificial Sequence:  Hypothetical Probe Sequence
cacgatcgaatcacgggacc

SEQ ID NO: 7709 - DNA, 20 bp, Artificial Sequence
  Description of Artificial Sequence:  Hypothetical Probe Sequence
atcgctgtagtgatcgccat

SEQ ID NO: 7710 - DNA, 20 bp, Artificial Sequence
  Description of Artificial Sequence:  Hypothetical Probe Sequence
cacgatcgggtatacaacgg

SEQ ID NO: 7711 - DNA, 20 bp, Artificial Sequence
  Description of Artificial Sequence:  Hypothetical Probe Sequence
atcggtctcttgtccccgaa

SEQ ID NO: 7712 - DNA, 20 bp, Artificial Sequence
  Description of Artificial Sequence:  Hypothetical Probe Sequence
atcgagtgccatcagcgcaa

SEQ ID NO: 7713 - DNA, 20 bp, Artificial Sequence
  Description of Artificial Sequence:  Hypothetical Probe Sequence
cacgatcgacctcgaaacgg

SEQ ID NO: 7714 - DNA, 20 bp, Artificial Sequence
  Description of Artificial Sequence:  Hypothetical Probe Sequence
cacgatcgagccgatgagcc

SEQ ID NO: 7715 - DNA, 20 bp, Artificial Sequence
  Description of Artificial Sequence:  Hypothetical Probe Sequence
cacgaggaaaaggcaatccc

SEQ ID NO: 7716 - DNA, 20 bp, Artificial Sequence
  Description of Artificial Sequence:  Hypothetical Probe Sequence
cacgaggatcgtcttgacgg

SEQ ID NO: 7717 - DNA, 20 bp, Artificial Sequence
  Description of Artificial Sequence:  Hypothetical Probe Sequence
cacgaggacttgtgcgctca

SEQ ID NO: 7718 - DNA, 20 bp, Artificial Sequence
  Description of Artificial Sequence:  Hypothetical Probe Sequence
aggaccattccccagcgacc

SEQ ID NO: 7719 - DNA, 20 bp, Artificial Sequence
  Description of Artificial Sequence:  Hypothetical Probe Sequence
cacgaggaaccttgcgaaag

SEQ ID NO: 7720 - DNA, 20 bp, Artificial Sequence
  Description of Artificial Sequence:  Hypothetical Probe Sequence
cacgaggacacggcttctca

SEQ ID NO: 7721 - DNA, 20 bp, Artificial Sequence
  Description of Artificial Sequence:  Hypothetical Probe Sequence
aggacagcgcttcagctccc

SEQ ID NO: 7722 - DNA, 20 bp, Artificial Sequence
  Description of Artificial Sequence:  Hypothetical Probe Sequence
aggaggacagtggacccgtt

SEQ ID NO: 7723 - DNA, 20 bp, Artificial Sequence
  Description of Artificial Sequence:  Hypothetical Probe Sequence
cacgaggaagccttgaacgg

SEQ ID NO: 7724 - DNA, 20 bp, Artificial Sequence
  Description of Artificial Sequence:  Hypothetical Probe Sequence
cacgcctaaatcgaccatcg

SEQ ID NO: 7725 - DNA, 20 bp, Artificial Sequence
  Description of Artificial Sequence:  Hypothetical Probe Sequence
cacgcctagcttcgttagcc

SEQ ID NO: 7726 - DNA, 20 bp, Artificial Sequence
  Description of Artificial Sequence:  Hypothetical Probe Sequence
cacgcctaatcgtgcgtctg

SEQ ID NO: 7727 - DNA, 20 bp, Artificial Sequence
  Description of Artificial Sequence:  Hypothetical Probe Sequence
cacgcctagatgggtacagc

SEQ ID NO: 7728 - DNA, 20 bp, Artificial Sequence
  Description of Artificial Sequence:  Hypothetical Probe Sequence
cacggatgtcgtcttgggac

SEQ ID NO: 7729 - DNA, 20 bp, Artificial Sequence
  Description of Artificial Sequence:  Hypothetical Probe Sequence
cacggatgcttgtcccccat

SEQ ID NO: 7730 - DNA, 20 bp, Artificial Sequence
  Description of Artificial Sequence:  Hypothetical Probe Sequence
cacggatgctcagctttgtc

SEQ ID NO: 7731 - DNA, 20 bp, Artificial Sequence
  Description of Artificial Sequence:  Hypothetical Probe Sequence
cacggatgggtatcgtagcc

SEQ ID NO: 7732 - DNA, 20 bp, Artificial Sequence
  Description of Artificial Sequence:  Hypothetical Probe Sequence
cacggatggagtcagcccta

SEQ ID NO: 7733 - DNA, 20 bp, Artificial Sequence
  Description of Artificial Sequence:  Hypothetical Probe Sequence
cacggatgcagcgaccagtg

SEQ ID NO: 7734 - DNA, 20 bp, Artificial Sequence
  Description of Artificial Sequence:  Hypothetical Probe Sequence
cacggatggtgccgttcacg

SEQ ID NO: 7735 - DNA, 20 bp, Artificial Sequence
  Description of Artificial Sequence:  Hypothetical Probe Sequence
cacgtcccaatcgtgcgcaa

SEQ ID NO: 7736 - DNA, 20 bp, Artificial Sequence
  Description of Artificial Sequence:  Hypothetical Probe Sequence
cacgtccctctggtgcagcc

SEQ ID NO: 7737 - DNA, 20 bp, Artificial Sequence
  Description of Artificial Sequence:  Hypothetical Probe Sequence
cacgtcccgcttggtaggta

SEQ ID NO: 7738 - DNA, 20 bp, Artificial Sequence
  Description of Artificial Sequence:  Hypothetical Probe Sequence
tcccggtagcttgatgggac

SEQ ID NO: 7739 - DNA, 20 bp, Artificial Sequence
  Description of Artificial Sequence:  Hypothetical Probe Sequence
tccctgcgggtacttgccat

SEQ ID NO: 7740 - DNA, 20 bp, Artificial Sequence
  Description of Artificial Sequence:  Hypothetical Probe Sequence
cacgtcccacggtgatctca

SEQ ID NO: 7741 - DNA, 20 bp, Artificial Sequence
  Description of Artificial Sequence:  Hypothetical Probe Sequence
cacgtgcgttgaagtgcgtt

SEQ ID NO: 7742 - DNA, 20 bp, Artificial Sequence
  Description of Artificial Sequence:  Hypothetical Probe Sequence
cacgtgcgatacacggggac

SEQ ID NO: 7743 - DNA, 20 bp, Artificial Sequence
  Description of Artificial Sequence:  Hypothetical Probe Sequence
cacgtgcgtacatcccagga

SEQ ID NO: 7744 - DNA, 20 bp, Artificial Sequence
  Description of Artificial Sequence:  Hypothetical Probe Sequence
tgcgtctgcgtttctgcagc

SEQ ID NO: 7745 - DNA, 20 bp, Artificial Sequence
  Description of Artificial Sequence:  Hypothetical Probe Sequence
cacgtgcgtgtctcgttcgt

SEQ ID NO: 7746 - DNA, 20 bp, Artificial Sequence
  Description of Artificial Sequence:  Hypothetical Probe Sequence
tgcggcttcctatctggtgc

SEQ ID NO: 7747 - DNA, 20 bp, Artificial Sequence
  Description of Artificial Sequence:  Hypothetical Probe Sequence
cacgtgcgggtaagtgcacg

SEQ ID NO: 7748 - DNA, 20 bp, Artificial Sequence
  Description of Artificial Sequence:  Hypothetical Probe Sequence
tgcggagtcgttgagtcacg

SEQ ID NO: 7749 - DNA, 20 bp, Artificial Sequence
  Description of Artificial Sequence:  Hypothetical Probe Sequence
cacgtgcggcaaggtacagc

SEQ ID NO: 7750 - DNA, 20 bp, Artificial Sequence
  Description of Artificial Sequence:  Hypothetical Probe Sequence
cacgtgcgagtgccatgacc

SEQ ID NO: 7751 - DNA, 20 bp, Artificial Sequence
  Description of Artificial Sequence:  Hypothetical Probe Sequence
cacgtgcgatcgaaagagcc

SEQ ID NO: 7752 - DNA, 20 bp, Artificial Sequence
  Description of Artificial Sequence:  Hypothetical Probe Sequence
tgcgcctactgtgaccacgg

SEQ ID NO: 7753 - DNA, 20 bp, Artificial Sequence
  Description of Artificial Sequence:  Hypothetical Probe Sequence
tgcgtgcggcaatacatgcg

SEQ ID NO: 7754 - DNA, 20 bp, Artificial Sequence
  Description of Artificial Sequence:  Hypothetical Probe Sequence
tgcgacggcctaaaagtccc

SEQ ID NO: 7755 - DNA, 20 bp, Artificial Sequence
  Description of Artificial Sequence:  Hypothetical Probe Sequence
cacgcacgttgaaatctccc

SEQ ID NO: 7756 - DNA, 20 bp, Artificial Sequence
  Description of Artificial Sequence:  Hypothetical Probe Sequence
cacgcacgtctggcttcagc

SEQ ID NO: 7757 - DNA, 20 bp, Artificial Sequence
  Description of Artificial Sequence:  Hypothetical Probe Sequence
cacgcacgtcgtctcatgcg

SEQ ID NO: 7758 - DNA, 20 bp, Artificial Sequence
  Description of Artificial Sequence:  Hypothetical Probe Sequence
cacgcacgccataaagaaag

SEQ ID NO: 7759 - DNA, 20 bp, Artificial Sequence
  Description of Artificial Sequence:  Hypothetical Probe Sequence
cacggtcttacacgtttgcg

SEQ ID NO: 7760 - DNA, 20 bp, Artificial Sequence
  Description of Artificial Sequence:  Hypothetical Probe Sequence
cacgcacgatcgcagcaatc

SEQ ID NO: 7761 - DNA, 20 bp, Artificial Sequence
  Description of Artificial Sequence:  Hypothetical Probe Sequence
cacgcacgcagccgaagagt

SEQ ID NO: 7762 - DNA, 20 bp, Artificial Sequence
  Description of Artificial Sequence:  Hypothetical Probe Sequence
cacgcacggaccgaccgtct

SEQ ID NO: 7763 - DNA, 20 bp, Artificial Sequence
  Description of Artificial Sequence:  Hypothetical Probe Sequence
cacgcagcttagcacggtgc

SEQ ID NO: 7764 - DNA, 20 bp, Artificial Sequence
  Description of Artificial Sequence:  Hypothetical Probe Sequence
cacgcagctctgcagcccat

SEQ ID NO: 7765 - DNA, 20 bp, Artificial Sequence
  Description of Artificial Sequence:  Hypothetical Probe Sequence
cacgcagccttgggtaaaag

SEQ ID NO: 7766 - DNA, 20 bp, Artificial Sequence
  Description of Artificial Sequence:  Hypothetical Probe Sequence
cacgcagcctcaacggacgg

SEQ ID NO: 7767 - DNA, 20 bp, Artificial Sequence
  Description of Artificial Sequence:  Hypothetical Probe Sequence
cacgcagcggtacgttatcg

SEQ ID NO: 7768 - DNA, 20 bp, Artificial Sequence
  Description of Artificial Sequence:  Hypothetical Probe Sequence
cacgcagcgtctgagttccc

SEQ ID NO: 7769 - DNA, 20 bp, Artificial Sequence
  Description of Artificial Sequence:  Hypothetical Probe Sequence
cacgcagcacctttgatcgt

SEQ ID NO: 7770 - DNA, 20 bp, Artificial Sequence
  Description of Artificial Sequence:  Hypothetical Probe Sequence
cacgcagcatcgcctagacc

SEQ ID NO: 7771 - DNA, 20 bp, Artificial Sequence
  Description of Artificial Sequence:  Hypothetical Probe Sequence
cacgcagcgatgggtagacc

SEQ ID NO: 7772 - DNA, 20 bp, Artificial Sequence
  Description of Artificial Sequence:  Hypothetical Probe Sequence
cacgcagctccccttggtgc

SEQ ID NO: 7773 - DNA, 20 bp, Artificial Sequence
  Description of Artificial Sequence:  Hypothetical Probe Sequence
cacggaccaatctgcgacct

SEQ ID NO: 7774 - DNA, 20 bp, Artificial Sequence
  Description of Artificial Sequence:  Hypothetical Probe Sequence
cacggacctctgcgttcacg

SEQ ID NO: 7775 - DNA, 20 bp, Artificial Sequence
  Description of Artificial Sequence:  Hypothetical Probe Sequence
cacggaccccatgatggtgc

SEQ ID NO: 7776 - DNA, 20 bp, Artificial Sequence
  Description of Artificial Sequence:  Hypothetical Probe Sequence
cacggaccgcaatcgtcttg

SEQ ID NO: 7777 - DNA, 20 bp, Artificial Sequence
  Description of Artificial Sequence:  Hypothetical Probe Sequence
cacggaccatcgaatccgaa

SEQ ID NO: 7778 - DNA, 20 bp, Artificial Sequence
  Description of Artificial Sequence:  Hypothetical Probe Sequence
gaccaggaggtatgtctgcg

SEQ ID NO: 7779 - DNA, 20 bp, Artificial Sequence
  Description of Artificial Sequence:  Hypothetical Probe Sequence
cacggaccgatgttagccat

SEQ ID NO: 7780 - DNA, 20 bp, Artificial Sequence
  Description of Artificial Sequence:  Hypothetical Probe Sequence
cacggtgcttagacgggtgc

SEQ ID NO: 7781 - DNA, 20 bp, Artificial Sequence
  Description of Artificial Sequence:  Hypothetical Probe Sequence
cacggtgcaatcccatcacg

SEQ ID NO: 7782 - DNA, 20 bp, Artificial Sequence
  Description of Artificial Sequence:  Hypothetical Probe Sequence
cacggtgcaaagaaagcagc

SEQ ID NO: 7783 - DNA, 20 bp, Artificial Sequence
  Description of Artificial Sequence:  Hypothetical Probe Sequence
cacggtgctctgcttgcgaa

SEQ ID NO: 7784 - DNA, 20 bp, Artificial Sequence
  Description of Artificial Sequence:  Hypothetical Probe Sequence
cacggtgccttgcgaactca

SEQ ID NO: 7785 - DNA, 20 bp, Artificial Sequence
  Description of Artificial Sequence:  Hypothetical Probe Sequence
cacggtgcctcaacctctca

SEQ ID NO: 7786 - DNA, 20 bp, Artificial Sequence
  Description of Artificial Sequence:  Hypothetical Probe Sequence
cacggtgccgaaaggagacc

SEQ ID NO: 7787 - DNA, 20 bp, Artificial Sequence
  Description of Artificial Sequence:  Hypothetical Probe Sequence
cacggtgcgagtgcaaagcc

SEQ ID NO: 7788 - DNA, 20 bp, Artificial Sequence
  Description of Artificial Sequence:  Hypothetical Probe Sequence
cacggtgcacctaggagcaa

SEQ ID NO: 7789 - DNA, 20 bp, Artificial Sequence
  Description of Artificial Sequence:  Hypothetical Probe Sequence
cacggtgcaggaatcgagga

SEQ ID NO: 7790 - DNA, 20 bp, Artificial Sequence
  Description of Artificial Sequence:  Hypothetical Probe Sequence
cacggtgccctaacctccta

SEQ ID NO: 7791 - DNA, 20 bp, Artificial Sequence
  Description of Artificial Sequence:  Hypothetical Probe Sequence
cacggtgctccccagcctgt

SEQ ID NO: 7792 - DNA, 20 bp, Artificial Sequence
  Description of Artificial Sequence:  Hypothetical Probe Sequence
cacggtgctgcgtgatgtgc

SEQ ID NO: 7793 - DNA, 20 bp, Artificial Sequence
  Description of Artificial Sequence:  Hypothetical Probe Sequence
cacggtgcggacgtgcagcc

SEQ ID NO: 7794 - DNA, 20 bp, Artificial Sequence
  Description of Artificial Sequence:  Hypothetical Probe Sequence
ggacttgagcttcgtttgcg

SEQ ID NO: 7795 - DNA, 20 bp, Artificial Sequence
  Description of Artificial Sequence:  Hypothetical Probe Sequence
cacgggacaatcttgaagcc

SEQ ID NO: 7796 - DNA, 20 bp, Artificial Sequence
  Description of Artificial Sequence:  Hypothetical Probe Sequence
cacgggacatacagccacct

SEQ ID NO: 7797 - DNA, 20 bp, Artificial Sequence
  Description of Artificial Sequence:  Hypothetical Probe Sequence
cacgggacctcactcagctt

SEQ ID NO: 7798 - DNA, 20 bp, Artificial Sequence
  Description of Artificial Sequence:  Hypothetical Probe Sequence
ggacctgtcttgagtgcacg

SEQ ID NO: 7799 - DNA, 20 bp, Artificial Sequence
  Description of Artificial Sequence:  Hypothetical Probe Sequence
cacgggacgagtttgaatcg

SEQ ID NO: 7800 - DNA, 20 bp, Artificial Sequence
  Description of Artificial Sequence:  Hypothetical Probe Sequence
cacgggaccctagtgcggac

SEQ ID NO: 7801 - DNA, 20 bp, Artificial Sequence
  Description of Artificial Sequence:  Hypothetical Probe Sequence
cacgggacgaccacggtgat

SEQ ID NO: 7802 - DNA, 20 bp, Artificial Sequence
  Description of Artificial Sequence:  Hypothetical Probe Sequence
acggaatctcgttgattccc

SEQ ID NO: 7803 - DNA, 20 bp, Artificial Sequence
  Description of Artificial Sequence:  Hypothetical Probe Sequence
cacgacggtacaagcccagc

SEQ ID NO: 7804 - DNA, 20 bp, Artificial Sequence
  Description of Artificial Sequence:  Hypothetical Probe Sequence
cacgacggtgtcgtgcgtgc

SEQ ID NO: 7805 - DNA, 20 bp, Artificial Sequence
  Description of Artificial Sequence:  Hypothetical Probe Sequence
acggagtgcttgttgatgcg

SEQ ID NO: 7806 - DNA, 20 bp, Artificial Sequence
  Description of Artificial Sequence:  Hypothetical Probe Sequence
cacgacggatcgcgtttcgt

SEQ ID NO: 7807 - DNA, 20 bp, Artificial Sequence
  Description of Artificial Sequence:  Hypothetical Probe Sequence
cacgacggcagctctggctt

SEQ ID NO: 7808 - DNA, 20 bp, Artificial Sequence
  Description of Artificial Sequence:  Hypothetical Probe Sequence
cacgacggggacaggaaatc

SEQ ID NO: 7809 - DNA, 20 bp, Artificial Sequence
  Description of Artificial Sequence:  Hypothetical Probe Sequence
cacgagccaaagtgcggagt

SEQ ID NO: 7810 - DNA, 20 bp, Artificial Sequence
  Description of Artificial Sequence:  Hypothetical Probe Sequence
cacgagcctacaacggtgcg

SEQ ID NO: 7811 - DNA, 20 bp, Artificial Sequence
  Description of Artificial Sequence:  Hypothetical Probe Sequence
cacgagcctctgaatcgctt

SEQ ID NO: 7812 - DNA, 20 bp, Artificial Sequence
  Description of Artificial Sequence:  Hypothetical Probe Sequence
cacgagcctgtcagccccta

SEQ ID NO: 7813 - DNA, 20 bp, Artificial Sequence
  Description of Artificial Sequence:  Hypothetical Probe Sequence
cacgagccctcacgttggac

SEQ ID NO: 7814 - DNA, 20 bp, Artificial Sequence
  Description of Artificial Sequence:  Hypothetical Probe Sequence
cacgagccgcttacctagga

SEQ ID NO: 7815 - DNA, 20 bp, Artificial Sequence
  Description of Artificial Sequence:  Hypothetical Probe Sequence
cacgagccagtgcgttagcc

SEQ ID NO: 7816 - DNA, 20 bp, Artificial Sequence
  Description of Artificial Sequence:  Hypothetical Probe Sequence
agccacctcagcagtgcagc

SEQ ID NO: 7817 - DNA, 20 bp, Artificial Sequence
  Description of Artificial Sequence:  Hypothetical Probe Sequence
cacgagcctgcggaccggac

SEQ ID NO: 7818 - DNA, 20 bp, Artificial Sequence
  Description of Artificial Sequence:  Hypothetical Probe Sequence
cacgagcccacggcaacagc

SEQ ID NO: 7819 - DNA, 20 bp, Artificial Sequence
  Description of Artificial Sequence:  Hypothetical Probe Sequence
agccgtgcgagtcttgtgcg

SEQ ID NO: 7820 - DNA, 20 bp, Artificial Sequence
  Description of Artificial Sequence:  Hypothetical Probe Sequence
cacgagccggacctcatcgt

SEQ ID NO: 7821 - DNA, 20 bp, Artificial Sequence
  Description of Artificial Sequence:  Hypothetical Probe Sequence
ttgagtgccgaaagccggac

SEQ ID NO: 7822 - DNA, 20 bp, Artificial Sequence
  Description of Artificial Sequence:  Hypothetical Probe Sequence
tgatgcttggacagcccagc

SEQ ID NO: 7823 - DNA, 20 bp, Artificial Sequence
  Description of Artificial Sequence:  Hypothetical Probe Sequence
tgatgcaacacgcttggtgc

SEQ ID NO: 7824 - DNA, 20 bp, Artificial Sequence
  Description of Artificial Sequence:  Hypothetical Probe Sequence
tgattcccagtgcacggtgc

SEQ ID NO: 7825 - DNA, 20 bp, Artificial Sequence
  Description of Artificial Sequence:  Hypothetical Probe Sequence
aatctcgtacggcacgcgtt

SEQ ID NO: 7826 - DNA, 20 bp, Artificial Sequence
  Description of Artificial Sequence:  Hypothetical Probe Sequence
aatcctcacgttagccgtgc

SEQ ID NO: 7827 - DNA, 20 bp, Artificial Sequence
  Description of Artificial Sequence:  Hypothetical Probe Sequence
cagcaatcggtaacggcttg

SEQ ID NO: 7828 - DNA, 20 bp, Artificial Sequence
  Description of Artificial Sequence:  Hypothetical Probe Sequence
cagcaatcgtcttccccagc

SEQ ID NO: 7829 - DNA, 20 bp, Artificial Sequence
  Description of Artificial Sequence:  Hypothetical Probe Sequence
cagcaatcatcgaaagcacg

SEQ ID NO: 7830 - DNA, 20 bp, Artificial Sequence
  Description of Artificial Sequence:  Hypothetical Probe Sequence
atactcccacggacggcgaa

SEQ ID NO: 7831 - DNA, 20 bp, Artificial Sequence
  Description of Artificial Sequence:  Hypothetical Probe Sequence
cagcatactgcgcacgtgcg

SEQ ID NO: 7832 - DNA, 20 bp, Artificial Sequence
  Description of Artificial Sequence:  Hypothetical Probe Sequence
aaaggtgcgtctagccagcc

SEQ ID NO: 7833 - DNA, 20 bp, Artificial Sequence
  Description of Artificial Sequence:  Hypothetical Probe Sequence
aaagacggcacgagtgagcc

SEQ ID NO: 7834 - DNA, 20 bp, Artificial Sequence
  Description of Artificial Sequence:  Hypothetical Probe Sequence
tctggatgagccacggcacg

SEQ ID NO: 7835 - DNA, 20 bp, Artificial Sequence
  Description of Artificial Sequence:  Hypothetical Probe Sequence
tgtccttgtcccgctttccc

SEQ ID NO: 7836 - DNA, 20 bp, Artificial Sequence
  Description of Artificial Sequence:  Hypothetical Probe Sequence
tgtcctcatgcgtgcggacc

SEQ ID NO: 7837 - DNA, 20 bp, Artificial Sequence
  Description of Artificial Sequence:  Hypothetical Probe Sequence
cagctgtcgtgcccatgcaa

SEQ ID NO: 7838 - DNA, 20 bp, Artificial Sequence
  Description of Artificial Sequence:  Hypothetical Probe Sequence
tgtcagcccgaaacctacgg

SEQ ID NO: 7839 - DNA, 20 bp, Artificial Sequence
  Description of Artificial Sequence:  Hypothetical Probe Sequence
cagctcgttcccgcttggac

SEQ ID NO: 7840 - DNA, 20 bp, Artificial Sequence
  Description of Artificial Sequence:  Hypothetical Probe Sequence
tcgtcagctcgtgagttgcg

SEQ ID NO: 7841 - DNA, 20 bp, Artificial Sequence
  Description of Artificial Sequence:  Hypothetical Probe Sequence
cttgaaaggcttagcctgcg

SEQ ID NO: 7842 - DNA, 20 bp, Artificial Sequence
  Description of Artificial Sequence:  Hypothetical Probe Sequence
cagccttgtctggaccagcc

SEQ ID NO: 7843 - DNA, 20 bp, Artificial Sequence
  Description of Artificial Sequence:  Hypothetical Probe Sequence
cagccttgtcgtatacgtgc

SEQ ID NO: 7844 - DNA, 20 bp, Artificial Sequence
  Description of Artificial Sequence:  Hypothetical Probe Sequence
cagccttgagtggacctgcg

SEQ ID NO: 7845 - DNA, 20 bp, Artificial Sequence
  Description of Artificial Sequence:  Hypothetical Probe Sequence
cttgaggagcaagaccacgg

SEQ ID NO: 7846 - DNA, 20 bp, Artificial Sequence
  Description of Artificial Sequence:  Hypothetical Probe Sequence
cagccttgtcccctcaatcg

SEQ ID NO: 7847 - DNA, 20 bp, Artificial Sequence
  Description of Artificial Sequence:  Hypothetical Probe Sequence
cagccttggacccgttcgtt

SEQ ID NO: 7848 - DNA, 20 bp, Artificial Sequence
  Description of Artificial Sequence:  Hypothetical Probe Sequence
cagccttgacgggcaagtct

SEQ ID NO: 7849 - DNA, 20 bp, Artificial Sequence
  Description of Artificial Sequence:  Hypothetical Probe Sequence
cagccgtttacatctgtccc

SEQ ID NO: 7850 - DNA, 20 bp, Artificial Sequence
  Description of Artificial Sequence:  Hypothetical Probe Sequence
cagccgtttctgaaagcagc

SEQ ID NO: 7851 - DNA, 20 bp, Artificial Sequence
  Description of Artificial Sequence:  Hypothetical Probe Sequence
cagccgttgcttagccctca

SEQ ID NO: 7852 - DNA, 20 bp, Artificial Sequence
  Description of Artificial Sequence:  Hypothetical Probe Sequence
cagccgttggtaacctgacc

SEQ ID NO: 7853 - DNA, 20 bp, Artificial Sequence
  Description of Artificial Sequence:  Hypothetical Probe Sequence
cagccgttgcaaatcggtct

SEQ ID NO: 7854 - DNA, 20 bp, Artificial Sequence
  Description of Artificial Sequence:  Hypothetical Probe Sequence
cagccgttatcggatgacct

SEQ ID NO: 7855 - DNA, 20 bp, Artificial Sequence
  Description of Artificial Sequence:  Hypothetical Probe Sequence
cgttcctaacggataccacg

SEQ ID NO: 7856 - DNA, 20 bp, Artificial Sequence
  Description of Artificial Sequence:  Hypothetical Probe Sequence
cgttgtgctcgtaaaggcaa

SEQ ID NO: 7857 - DNA, 20 bp, Artificial Sequence
  Description of Artificial Sequence:  Hypothetical Probe Sequence
cagccgttggacgatggctt

SEQ ID NO: 7858 - DNA, 20 bp, Artificial Sequence
  Description of Artificial Sequence:  Hypothetical Probe Sequence
cagccgttagccgcttagcc

SEQ ID NO: 7859 - DNA, 20 bp, Artificial Sequence
  Description of Artificial Sequence:  Hypothetical Probe Sequence
cagcctcatcgtaaaggtgc

SEQ ID NO: 7860 - DNA, 20 bp, Artificial Sequence
  Description of Artificial Sequence:  Hypothetical Probe Sequence
cagcctcaccatcagcgtgc

SEQ ID NO: 7861 - DNA, 20 bp, Artificial Sequence
  Description of Artificial Sequence:  Hypothetical Probe Sequence
cagcctcacgaacgaacgtt

SEQ ID NO: 7862 - DNA, 20 bp, Artificial Sequence
  Description of Artificial Sequence:  Hypothetical Probe Sequence
cagcctcagctttcgtgcaa

SEQ ID NO: 7863 - DNA, 20 bp, Artificial Sequence
  Description of Artificial Sequence:  Hypothetical Probe Sequencetes sp.
cagcctcagcaagaccgagt

SEQ ID NO: 7864 - DNA, 20 bp, Artificial Sequence
  Description of Artificial Sequence:  Hypothetical Probe Sequence
cagcctcaacctaatcgacc

SEQ ID NO: 7865 - DNA, 20 bp, Artificial Sequence
  Description of Artificial Sequence:  Hypothetical Probe Sequence
cagcctcatcccgaccaaag

SEQ ID NO: 7866 - DNA, 20 bp, Artificial Sequence
  Description of Artificial Sequence:  Hypothetical Probe Sequence
ctcagacctgattccctgcg

SEQ ID NO: 7867 - DNA, 20 bp, Artificial Sequence
  Description of Artificial Sequence:  Hypothetical Probe Sequence
cagcctgtttgatcgtttga

SEQ ID NO: 7868 - DNA, 20 bp, Artificial Sequence
  Description of Artificial Sequence:  Hypothetical Probe Sequence
ctgttgatcgaatcccgtgc

SEQ ID NO: 7869 - DNA, 20 bp, Artificial Sequence
  Description of Artificial Sequence:  Hypothetical Probe Sequence
cagcctgttctgcgttgcaa

SEQ ID NO: 7870 - DNA, 20 bp, Artificial Sequence
  Description of Artificial Sequence:  Hypothetical Probe Sequence
cagcctgtctcaagccggac

SEQ ID NO: 7871 - DNA, 20 bp, Artificial Sequence
  Description of Artificial Sequence:  Hypothetical Probe Sequence
cagcctgtccatctcatgcg

SEQ ID NO: 7872 - DNA, 20 bp, Artificial Sequence
  Description of Artificial Sequence:  Hypothetical Probe Sequence
cagcctgtgcttctcatccc

SEQ ID NO: 7873 - DNA, 20 bp, Artificial Sequence
  Description of Artificial Sequence:  Hypothetical Probe Sequence
cagcctgtgtgccgaagctt

SEQ ID NO: 7874 - DNA, 20 bp, Artificial Sequence
  Description of Artificial Sequence:  Hypothetical Probe Sequence
cagcccattacacacgcacg

SEQ ID NO: 7875 - DNA, 20 bp, Artificial Sequence
  Description of Artificial Sequence:  Hypothetical Probe Sequence
cagcccattctgccatccat

SEQ ID NO: 7876 - DNA, 20 bp, Artificial Sequence
  Description of Artificial Sequence:  Hypothetical Probe Sequence
cagcccatcttgtgatcacg

SEQ ID NO: 7877 - DNA, 20 bp, Artificial Sequence
  Description of Artificial Sequence:  Hypothetical Probe Sequence
cagcccatcgttgcttccat

SEQ ID NO: 7878 - DNA, 20 bp, Artificial Sequence
  Description of Artificial Sequence:  Hypothetical Probe Sequence
ccatgtctccatgaccacgg

SEQ ID NO: 7879 - DNA, 20 bp, Artificial Sequence
  Description of Artificial Sequence:  Hypothetical Probe Sequence
ccatgagtgcttagccacgg

SEQ ID NO: 7880 - DNA, 20 bp, Artificial Sequence
  Description of Artificial Sequence:  Hypothetical Probe Sequence
cagcccatgcaatctgctca

SEQ ID NO: 7881 - DNA, 20 bp, Artificial Sequence
  Description of Artificial Sequence:  Hypothetical Probe Sequence
cagcccatcctaacggccat

SEQ ID NO: 7882 - DNA, 20 bp, Artificial Sequence
  Description of Artificial Sequence:  Hypothetical Probe Sequence
cagcccatcacgaaaggctt

SEQ ID NO: 7883 - DNA, 20 bp, Artificial Sequence
  Description of Artificial Sequence:  Hypothetical Probe Sequence
cagcccatacgggagtgtgc

SEQ ID NO: 7884 - DNA, 20 bp, Artificial Sequence
  Description of Artificial Sequence:  Hypothetical Probe Sequence
cagccgaatctgaaagcgaa

SEQ ID NO: 7885 - DNA, 20 bp, Artificial Sequence
  Description of Artificial Sequence:  Hypothetical Probe Sequence
cagccgaatgtccgttcttg

SEQ ID NO: 7886 - DNA, 20 bp, Artificial Sequence
  Description of Artificial Sequence:  Hypothetical Probe Sequence
cagccgaagtcttgcgaatc

SEQ ID NO: 7887 - DNA, 20 bp, Artificial Sequence
  Description of Artificial Sequence:  Hypothetical Probe Sequence
cgaaagtgatacgtgcgcaa

SEQ ID NO: 7888 - DNA, 20 bp, Artificial Sequence
  Description of Artificial Sequence:  Hypothetical Probe Sequence
cagccgaaaggatgtcatcg

SEQ ID NO: 7889 - DNA, 20 bp, Artificial Sequence
  Description of Artificial Sequence:  Hypothetical Probe Sequence
cagccgaatgcgcttggcaa

SEQ ID NO: 7890 - DNA, 20 bp, Artificial Sequence
  Description of Artificial Sequence:  Hypothetical Probe Sequence
cagccgaacacggcttgctt

SEQ ID NO: 7891 - DNA, 20 bp, Artificial Sequence
  Description of Artificial Sequence:  Hypothetical Probe Sequence
cgaagacccacgatacgtgc

SEQ ID NO: 7892 - DNA, 20 bp, Artificial Sequence
  Description of Artificial Sequence:  Hypothetical Probe Sequence
cagccgaaacggcacgtgtc

SEQ ID NO: 7893 - DNA, 20 bp, Artificial Sequence
  Description of Artificial Sequence:  Hypothetical Probe Sequence
cagccgaaagccggtagatg

SEQ ID NO: 7894 - DNA, 20 bp, Artificial Sequence
  Description of Artificial Sequence:  Hypothetical Probe Sequence
cagcgcttaatctgcgtctg

SEQ ID NO: 7895 - DNA, 20 bp, Artificial Sequence
  Description of Artificial Sequence:  Hypothetical Probe Sequence
cagcgctttacacgtttgtc

SEQ ID NO: 7896 - DNA, 20 bp, Artificial Sequence
  Description of Artificial Sequence:  Hypothetical Probe Sequence
cagcgctttgtccgaaaaag

SEQ ID NO: 7897 - DNA, 20 bp, Artificial Sequence
  Description of Artificial Sequence:  Hypothetical Probe Sequence
cagcgctttcgttcgtttga

SEQ ID NO: 7898 - DNA, 20 bp, Artificial Sequence
  Description of Artificial Sequence:  Hypothetical Probe Sequence
cagcgcttctcaggacccat

SEQ ID NO: 7899 - DNA, 20 bp, Artificial Sequence
  Description of Artificial Sequence:  Hypothetical Probe Sequence
cagcgcttctgtcgaagtgc

SEQ ID NO: 7900 - DNA, 20 bp, Artificial Sequence
  Description of Artificial Sequence:  Hypothetical Probe Sequence
cagcgcttatcgcgaaaatc

SEQ ID NO: 7901 - DNA, 20 bp, Artificial Sequence
  Description of Artificial Sequence:  Hypothetical Probe Sequence
cagcgctttgcggcttgagt

SEQ ID NO: 7902 - DNA, 20 bp, Artificial Sequence
  Description of Artificial Sequence:  Hypothetical Probe Sequence
cagcgcttagccttgacttg

SEQ ID NO: 7903 - DNA, 20 bp, Artificial Sequence
  Description of Artificial Sequence:  Hypothetical Probe Sequence
cagcggtaccatccatgacc

SEQ ID NO: 7904 - DNA, 20 bp, Artificial Sequence
  Description of Artificial Sequence:  Hypothetical Probe Sequence
cagcggtacgaacgaacttg

SEQ ID NO: 7905 - DNA, 20 bp, Artificial Sequence
  Description of Artificial Sequence:  Hypothetical Probe Sequence
cagcggtacagcacctgctt

SEQ ID NO: 7906 - DNA, 20 bp, Artificial Sequence
  Description of Artificial Sequence:  Hypothetical Probe Sequence
cagcgtcttgatggaccagc

SEQ ID NO: 7907 - DNA, 20 bp, Artificial Sequence
  Description of Artificial Sequence:  Hypothetical Probe Sequence
gtctccatctcatcgttgcg

SEQ ID NO: 7908 - DNA, 20 bp, Artificial Sequence
  Description of Artificial Sequence:  Hypothetical Probe Sequence
cagcgtctcgaatcgttccc

SEQ ID NO: 7909 - DNA, 20 bp, Artificial Sequence
  Description of Artificial Sequence:  Hypothetical Probe Sequence
cagcgtctgcttatcgtccc

SEQ ID NO: 7910 - DNA, 20 bp, Artificial Sequence
  Description of Artificial Sequence:  Hypothetical Probe Sequence
cagcgtcttgcgaggagatg

SEQ ID NO: 7911 - DNA, 20 bp, Artificial Sequence
  Description of Artificial Sequence:  Hypothetical Probe Sequence
cagcgtctggacttgaatcg

SEQ ID NO: 7912 - DNA, 20 bp, Artificial Sequence
  Description of Artificial Sequence:  Hypothetical Probe Sequence
cagcgtctacggaatcacgg

SEQ ID NO: 7913 - DNA, 20 bp, Artificial Sequence
  Description of Artificial Sequence:  Hypothetical Probe Sequence
cagcgagttctgcagcgatg

SEQ ID NO: 7914 - DNA, 20 bp, Artificial Sequence
  Description of Artificial Sequence:  Hypothetical Probe Sequence
cagcgagtcttggcaacacg

SEQ ID NO: 7915 - DNA, 20 bp, Artificial Sequence
  Description of Artificial Sequence:  Hypothetical Probe Sequence
cagcgagtcgttatcgtgtc

SEQ ID NO: 7916 - DNA, 20 bp, Artificial Sequence
  Description of Artificial Sequence:  Hypothetical Probe Sequence
cagcgagtcgaaaggacgaa

SEQ ID NO: 7917 - DNA, 20 bp, Artificial Sequence
  Description of Artificial Sequence:  Hypothetical Probe Sequence
cagcgagtgtgcgacctgcg

SEQ ID NO: 7918 - DNA, 20 bp, Artificial Sequence
  Description of Artificial Sequence:  Hypothetical Probe Sequence
cagcgcaatgatcgaaatcg

SEQ ID NO: 7919 - DNA, 20 bp, Artificial Sequence
  Description of Artificial Sequence:  Hypothetical Probe Sequence
cagcgcaaatacaatccagc

SEQ ID NO: 7920 - DNA, 20 bp, Artificial Sequence
  Description of Artificial Sequence:  Hypothetical Probe Sequence
cagcgcaatctggcttgatg

SEQ ID NO: 7921 - DNA, 20 bp, Artificial Sequence
  Description of Artificial Sequence:  Hypothetical Probe Sequence
cagcgcaatgtccgttggac

SEQ ID NO: 7922 - DNA, 20 bp, Artificial Sequence
  Description of Artificial Sequence:  Hypothetical Probe Sequence
cagcgcaaccatggtaatcg

SEQ ID NO: 7923 - DNA, 20 bp, Artificial Sequence
  Description of Artificial Sequence:  Hypothetical Probe Sequence
cagcgcaacgaatcgtcttg

SEQ ID NO: 7924 - DNA, 20 bp, Artificial Sequence
  Description of Artificial Sequence:  Hypothetical Probe Sequence
cagcgcaaggtagcaagacc

SEQ ID NO: 7925 - DNA, 20 bp, Artificial Sequence
  Description of Artificial Sequence:  Hypothetical Probe Sequence
cagcgcaagagtcgttcttg

SEQ ID NO: 7926 - DNA, 20 bp, Artificial Sequence
  Description of Artificial Sequence:  Hypothetical Probe Sequence
cagcgcaaagtgtgattccc

SEQ ID NO: 7927 - DNA, 20 bp, Artificial Sequence
  Description of Artificial Sequence:  Hypothetical Probe Sequence
cagcgcaaggacgatggacc

SEQ ID NO: 7928 - DNA, 20 bp, Artificial Sequence
  Description of Artificial Sequence:  Hypothetical Probe Sequence
cagcgcaaacggtcgtcacg

SEQ ID NO: 7929 - DNA, 20 bp, Artificial Sequence
  Description of Artificial Sequence:  Hypothetical Probe Sequence
agtgtcgtgtgctccccacg

SEQ ID NO: 7930 - DNA, 20 bp, Artificial Sequence
  Description of Artificial Sequence:  Hypothetical Probe Sequence
agtggcttgtgcctgttccc

SEQ ID NO: 7931 - DNA, 20 bp, Artificial Sequence
  Description of Artificial Sequence:  Hypothetical Probe Sequence
cagcagtgcctaatcgcacg

SEQ ID NO: 7932 - DNA, 20 bp, Artificial Sequence
  Description of Artificial Sequence:  Hypothetical Probe Sequence
cagcagtgtccccttgccat

SEQ ID NO: 7933 - DNA, 20 bp, Artificial Sequence
  Description of Artificial Sequence:  Hypothetical Probe Sequence
agtgggacgtctacggtgcg

SEQ ID NO: 7934 - DNA, 20 bp, Artificial Sequence
  Description of Artificial Sequence:  Hypothetical Probe Sequence
cagcacctcgaaaatctgcg

SEQ ID NO: 7935 - DNA, 20 bp, Artificial Sequence
  Description of Artificial Sequence:  Hypothetical Probe Sequence
cagcacctcacgtctgcgaa

SEQ ID NO: 7936 - DNA, 20 bp, Artificial Sequence
  Description of Artificial Sequence:  Hypothetical Probe Sequence
acctgtgcgacctgtccgaa

SEQ ID NO: 7937 - DNA, 20 bp, Artificial Sequence
  Description of Artificial Sequence:  Hypothetical Probe Sequence
cagcacctggacgcttgtgc

SEQ ID NO: 7938 - DNA, 20 bp, Artificial Sequence
  Description of Artificial Sequence:  Hypothetical Probe Sequence
cagcatcggcttacctgtgc

SEQ ID NO: 7939 - DNA, 20 bp, Artificial Sequence
  Description of Artificial Sequence:  Hypothetical Probe Sequence
atcgggtaagtgagccgctt

SEQ ID NO: 7940 - DNA, 20 bp, Artificial Sequence
  Description of Artificial Sequence:  Hypothetical Probe Sequence
atcgatcggcaatctggtgc

SEQ ID NO: 7941 - DNA, 20 bp, Artificial Sequence
  Description of Artificial Sequence:  Hypothetical Probe Sequence
cagcatcgacggcacgggta

SEQ ID NO: 7942 - DNA, 20 bp, Artificial Sequence
  Description of Artificial Sequence:  Hypothetical Probe Sequence
cagcaggaaatcacggtccc

SEQ ID NO: 7943 - DNA, 20 bp, Artificial Sequence
  Description of Artificial Sequence:  Hypothetical Probe Sequence
aggatcgtgtctcgaatgcg

SEQ ID NO: 7944 - DNA, 20 bp, Artificial Sequence
  Description of Artificial Sequence:  Hypothetical Probe Sequence
cagcaggacttgacggcacg

SEQ ID NO: 7945 - DNA, 20 bp, Artificial Sequence
  Description of Artificial Sequence:  Hypothetical Probe Sequence
cagcaggagcaaatcggtgc

SEQ ID NO: 7946 - DNA, 20 bp, Artificial Sequence
  Description of Artificial Sequence:  Hypothetical Probe Sequence
cagcaggaagtgtgcgctgt

SEQ ID NO: 7947 - DNA, 20 bp, Artificial Sequence
  Description of Artificial Sequence:  Hypothetical Probe Sequence
cagcaggacacggatggctt

SEQ ID NO: 7948 - DNA, 20 bp, Artificial Sequence
  Description of Artificial Sequence:  Hypothetical Probe Sequence
aggagtgctctgggactccc

SEQ ID NO: 7949 - DNA, 20 bp, Artificial Sequence
  Description of Artificial Sequence:  Hypothetical Probe Sequence
cagcaggaagccatacggac

SEQ ID NO: 7950 - DNA, 20 bp, Artificial Sequence
  Description of Artificial Sequence:  Hypothetical Probe Sequence
cctatcgtgctttgtcgcaa

SEQ ID NO: 7951 - DNA, 20 bp, Artificial Sequence
  Description of Artificial Sequence:  Hypothetical Probe Sequence
cagccctacgaatctgcagc

SEQ ID NO: 7952 - DNA, 20 bp, Artificial Sequence
  Description of Artificial Sequence:  Hypothetical Probe Sequence
cctagcaaatactccctgcg

SEQ ID NO: 7953 - DNA, 20 bp, Artificial Sequence
  Description of Artificial Sequence:  Hypothetical Probe Sequence
cagccctaagtgagccgtct

SEQ ID NO: 7954 - DNA, 20 bp, Artificial Sequence
  Description of Artificial Sequence:  Hypothetical Probe Sequence
cagccctaaccttcccagcc

SEQ ID NO: 7955 - DNA, 20 bp, Artificial Sequence
  Description of Artificial Sequence:  Hypothetical Probe Sequence
cagccctaacggtcgtctgt

SEQ ID NO: 7956 - DNA, 20 bp, Artificial Sequence
  Description of Artificial Sequence:  Hypothetical Probe Sequence
cagcgatgaatccacgggac

SEQ ID NO: 7957 - DNA, 20 bp, Artificial Sequence
  Description of Artificial Sequence:  Hypothetical Probe Sequence
cagcgatgtctgacctatcg

SEQ ID NO: 7958 - DNA, 20 bp, Artificial Sequence
  Description of Artificial Sequence:  Hypothetical Probe Sequence
gatgtgtcccatgctttgcg

SEQ ID NO: 7959 - DNA, 20 bp, Artificial Sequence
  Description of Artificial Sequence:  Hypothetical Probe Sequence
cagcgatgcttgctgtcttg

SEQ ID NO: 7960 - DNA, 20 bp, Artificial Sequence
  Description of Artificial Sequence:  Hypothetical Probe Sequence
cagcgatgctcagtgctctg

SEQ ID NO: 7961 - DNA, 20 bp, Artificial Sequence
  Description of Artificial Sequence:  Hypothetical Probe Sequence
gatggtcttgattcccgcaa

SEQ ID NO: 7962 - DNA, 20 bp, Artificial Sequence
  Description of Artificial Sequence:  Hypothetical Probe Sequence
cagcgatgaggatcgttcgt

SEQ ID NO: 7963 - DNA, 20 bp, Artificial Sequence
  Description of Artificial Sequence:  Hypothetical Probe Sequence
cagcgatgcctagcaaccta

SEQ ID NO: 7964 - DNA, 20 bp, Artificial Sequence
  Description of Artificial Sequence:  Hypothetical Probe Sequence
cagcgatgtccccttgccta

SEQ ID NO: 7965 - DNA, 20 bp, Artificial Sequence
  Description of Artificial Sequence:  Hypothetical Probe Sequence
cagcgatggaccgatgagtg

SEQ ID NO: 7966 - DNA, 20 bp, Artificial Sequence
  Description of Artificial Sequence:  Hypothetical Probe Sequence
cagcgatgacgggatgtcgt

SEQ ID NO: 7967 - DNA, 20 bp, Artificial Sequence
  Description of Artificial Sequence:  Hypothetical Probe Sequence
cagcgatgagccctgtgcaa

SEQ ID NO: 7968 - DNA, 20 bp, Artificial Sequence
  Description of Artificial Sequence:  Hypothetical Probe Sequence
tcccaaagtcccctgtagcc

SEQ ID NO: 7969 - DNA, 20 bp, Artificial Sequence
  Description of Artificial Sequence:  Hypothetical Probe Sequence
tccccgttaaagatcggacc

SEQ ID NO: 7970 - DNA, 20 bp, Artificial Sequence
  Description of Artificial Sequence:  Hypothetical Probe Sequence
cagctcccctgtatcgcgtt

SEQ ID NO: 7971 - DNA, 20 bp, Artificial Sequence
  Description of Artificial Sequence:  Hypothetical Probe Sequence
tccccgaaatcgtgtcgatg

SEQ ID NO: 7972 - DNA, 20 bp, Artificial Sequence
  Description of Artificial Sequence:  Hypothetical Probe Sequence
tcccgagtgcttttgaagcc

SEQ ID NO: 7973 - DNA, 20 bp, Artificial Sequence
  Description of Artificial Sequence:  Hypothetical Probe Sequence
tcccagtgttagacggccat

SEQ ID NO: 7974 - DNA, 20 bp, Artificial Sequence
  Description of Artificial Sequence:  Hypothetical Probe Sequence
cagctcccacctacctggac

SEQ ID NO: 7975 - DNA, 20 bp, Artificial Sequence
  Description of Artificial Sequence:  Hypothetical Probe Sequence
tcccgatggtcttcgtcgtt

SEQ ID NO: 7976 - DNA, 20 bp, Artificial Sequence
  Description of Artificial Sequence:  Hypothetical Probe Sequence
cagctccctcccgagttccc

SEQ ID NO: 7977 - DNA, 20 bp, Artificial Sequence
  Description of Artificial Sequence:  Hypothetical Probe Sequence
tccctgcgaatcaggacgaa

SEQ ID NO: 7978 - DNA, 20 bp, Artificial Sequence
  Description of Artificial Sequence:  Hypothetical Probe Sequence
tccccacggatgatcgatcg

SEQ ID NO: 7979 - DNA, 20 bp, Artificial Sequence
  Description of Artificial Sequence:  Hypothetical Probe Sequence
tcccacggtcgttgtccttg

SEQ ID NO: 7980 - DNA, 20 bp, Artificial Sequence
  Description of Artificial Sequence:  Hypothetical Probe Sequence
cagctgcgttgagtgccgtt

SEQ ID NO: 7981 - DNA, 20 bp, Artificial Sequence
  Description of Artificial Sequence:  Hypothetical Probe Sequence
tgcgttagtctgggaccgaa

SEQ ID NO: 7982 - DNA, 20 bp, Artificial Sequence
  Description of Artificial Sequence:  Hypothetical Probe Sequence
tgcgataccgaaagcccgtt

SEQ ID NO: 7983 - DNA, 20 bp, Artificial Sequence
  Description of Artificial Sequence:  Hypothetical Probe Sequence
cagctgcgtctggacccagc

SEQ ID NO: 7984 - DNA, 20 bp, Artificial Sequence
  Description of Artificial Sequence:  Hypothetical Probe Sequence
cagctgcgacctaatcagcc

SEQ ID NO: 7985 - DNA, 20 bp, Artificial Sequence
  Description of Artificial Sequence:  Hypothetical Probe Sequence
tgcgatcggctttgatgcaa

SEQ ID NO: 7986 - DNA, 20 bp, Artificial Sequence
  Description of Artificial Sequence:  Hypothetical Probe Sequence
tgcggatggcttgagtcagc

SEQ ID NO: 7987 - DNA, 20 bp, Artificial Sequence
  Description of Artificial Sequence:  Hypothetical Probe Sequence
cagctgcgtccctgtccacg

SEQ ID NO: 7988 - DNA, 20 bp, Artificial Sequence
  Description of Artificial Sequence:  Hypothetical Probe Sequence
cagctgcgcacgcttgacgg

SEQ ID NO: 7989 - DNA, 20 bp, Artificial Sequence
  Description of Artificial Sequence:  Hypothetical Probe Sequence
cacgttgattaggaccgcaa

SEQ ID NO: 7990 - DNA, 20 bp, Artificial Sequence
  Description of Artificial Sequence:  Hypothetical Probe Sequence
cagccacgaatcgagttgcg

SEQ ID NO: 7991 - DNA, 20 bp, Artificial Sequence
  Description of Artificial Sequence:  Hypothetical Probe Sequence
cagccacgataccgaaggac

SEQ ID NO: 7992 - DNA, 20 bp, Artificial Sequence
  Description of Artificial Sequence:  Hypothetical Probe Sequence
cacgtctgtgtctcccacgg

SEQ ID NO: 7993 - DNA, 20 bp, Artificial Sequence
  Description of Artificial Sequence:  Hypothetical Probe Sequence
cagccacgtcgtgcaagtct

SEQ ID NO: 7994 - DNA, 20 bp, Artificial Sequence
  Description of Artificial Sequence:  Hypothetical Probe Sequence
cagccacgcgttcgttccat

SEQ ID NO: 7995 - DNA, 20 bp, Artificial Sequence
  Description of Artificial Sequence:  Hypothetical Probe Sequence
cagccacgcgaagtgcaatc

SEQ ID NO: 7996 - DNA, 20 bp, Artificial Sequence
  Description of Artificial Sequence:  Hypothetical Probe Sequence
cagccacgcctatcccccta

SEQ ID NO: 7997 - DNA, 20 bp, Artificial Sequence
  Description of Artificial Sequence:  Hypothetical Probe Sequence
cagccagcttgaggacggta

SEQ ID NO: 7998 - DNA, 20 bp, Artificial Sequence
  Description of Artificial Sequence:  Hypothetical Probe Sequence
cagccagcttaggaccgtgc

SEQ ID NO: 7999 - DNA, 20 bp, Artificial Sequence
  Description of Artificial Sequence:  Hypothetical Probe Sequence
cagccagctgtcacggagga

SEQ ID NO: 8000 - DNA, 20 bp, Artificial Sequence
  Description of Artificial Sequence:  Hypothetical Probe Sequence
cagcctcaatacggtatgcg

SEQ ID NO: 8001 - DNA, 20 bp, Artificial Sequence
  Description of Artificial Sequence:  Hypothetical Probe Sequence
cagcccatatcgatactgcg

SEQ ID NO: 8002 - DNA, 20 bp, Artificial Sequence
  Description of Artificial Sequence:  Hypothetical Probe Sequence
cagccagcaggacgttcgaa

SEQ ID NO: 8003 - DNA, 20 bp, Artificial Sequence
  Description of Artificial Sequence:  Hypothetical Probe Sequence
cagccagcgatgttagggac

SEQ ID NO: 8004 - DNA, 20 bp, Artificial Sequence
  Description of Artificial Sequence:  Hypothetical Probe Sequence
cagccagctcccggtacttg

SEQ ID NO: 8005 - DNA, 20 bp, Artificial Sequence
  Description of Artificial Sequence:  Hypothetical Probe Sequence
cagccagcagcccttggatg

SEQ ID NO: 8006 - DNA, 20 bp, Artificial Sequence
  Description of Artificial Sequence:  Hypothetical Probe Sequence
cagcgaccaatcatacagcc

SEQ ID NO: 8007 - DNA, 20 bp, Artificial Sequence
  Description of Artificial Sequence:  Hypothetical Probe Sequence
cagcgacctcgtaggagcaa

SEQ ID NO: 8008 - DNA, 20 bp, Artificial Sequence
  Description of Artificial Sequence:  Hypothetical Probe Sequence
cagcgacccttgcctagacc

SEQ ID NO: 8009 - DNA, 20 bp, Artificial Sequence
  Description of Artificial Sequence:  Hypothetical Probe Sequence
cagcgaccgcaacacggtct

SEQ ID NO: 8010 - DNA, 20 bp, Artificial Sequence
  Description of Artificial Sequence:  Hypothetical Probe Sequence
cagcgaccatcgtacacagc

SEQ ID NO: 8011 - DNA, 20 bp, Artificial Sequence
  Description of Artificial Sequence:  Hypothetical Probe Sequence
cagcgacctcccaatcggac

SEQ ID NO: 8012 - DNA, 20 bp, Artificial Sequence
  Description of Artificial Sequence:  Hypothetical Probe Sequence
cagcgacccacggctttaca

SEQ ID NO: 8013 - DNA, 20 bp, Artificial Sequence
  Description of Artificial Sequence:  Hypothetical Probe Sequence
cagcgaccgacctcgtctgt

SEQ ID NO: 8014 - DNA, 20 bp, Artificial Sequence
  Description of Artificial Sequence:  Hypothetical Probe Sequence
cagcgaccagccaggaaatc

SEQ ID NO: 8015 - DNA, 20 bp, Artificial Sequence
  Description of Artificial Sequence:  Hypothetical Probe Sequence
cagcgtgcatactgcgaaag

SEQ ID NO: 8016 - DNA, 20 bp, Artificial Sequence
  Description of Artificial Sequence:  Hypothetical Probe Sequence
cagcgtgctacaagtgcacg

SEQ ID NO: 8017 - DNA, 20 bp, Artificial Sequence
  Description of Artificial Sequence:  Hypothetical Probe Sequence
cagcgtgctctggatggcaa

SEQ ID NO: 8018 - DNA, 20 bp, Artificial Sequence
  Description of Artificial Sequence:  Hypothetical Probe Sequence
cagcgtgctcgtagtgacgg

SEQ ID NO: 8019 - DNA, 20 bp, Artificial Sequence
  Description of Artificial Sequence:  Hypothetical Probe Sequence
cagcgtgcctgtaatctgcg

SEQ ID NO: 8020 - DNA, 20 bp, Artificial Sequence
  Description of Artificial Sequence:  Hypothetical Probe Sequence
cagcgtgccgaactgtgctt

SEQ ID NO: 8021 - DNA, 20 bp, Artificial Sequence
  Description of Artificial Sequence:  Hypothetical Probe Sequence
cagcgtgcgtctcttgcttg

SEQ ID NO: 8022 - DNA, 20 bp, Artificial Sequence
  Description of Artificial Sequence:  Hypothetical Probe Sequence
cagcgtgcaccttcgtcacg

SEQ ID NO: 8023 - DNA, 20 bp, Artificial Sequence
  Description of Artificial Sequence:  Hypothetical Probe Sequence
cagcgtgccacgcttgtcgt

SEQ ID NO: 8024 - DNA, 20 bp, Artificial Sequence
  Description of Artificial Sequence:  Hypothetical Probe Sequence
cagcgtgcgacccacggatg

SEQ ID NO: 8025 - DNA, 20 bp, Artificial Sequence
  Description of Artificial Sequence:  Hypothetical Probe Sequence
cagcgtgcggacatcgtgat

SEQ ID NO: 8026 - DNA, 20 bp, Artificial Sequence
  Description of Artificial Sequence:  Hypothetical Probe Sequence
cagcgtgcacggcagcgagt

SEQ ID NO: 8027 - DNA, 20 bp, Artificial Sequence
  Description of Artificial Sequence:  Hypothetical Probe Sequence
cagcgtgcagccctcaacgg

SEQ ID NO: 8028 - DNA, 20 bp, Artificial Sequence
  Description of Artificial Sequence:  Hypothetical Probe Sequence
cagcggactgatagccagga

SEQ ID NO: 8029 - DNA, 20 bp, Artificial Sequence
  Description of Artificial Sequence:  Hypothetical Probe Sequence
cagcggacaatcaaaggcaa

SEQ ID NO: 8030 - DNA, 20 bp, Artificial Sequence
  Description of Artificial Sequence:  Hypothetical Probe Sequence
cagcggactgtcaatccgaa

SEQ ID NO: 8031 - DNA, 20 bp, Artificial Sequence
  Description of Artificial Sequence:  Hypothetical Probe Sequence
cagcggacgagtcgaagctt

SEQ ID NO: 8032 - DNA, 20 bp, Artificial Sequence
  Description of Artificial Sequence:  Hypothetical Probe Sequence
cagcggacaccttacaagcc

SEQ ID NO: 8033 - DNA, 20 bp, Artificial Sequence
  Description of Artificial Sequence:  Hypothetical Probe Sequence
cagcggacgatgggacacct

SEQ ID NO: 8034 - DNA, 20 bp, Artificial Sequence
  Description of Artificial Sequence:  Hypothetical Probe Sequence
cagcggactgcggtctggac

SEQ ID NO: 8035 - DNA, 20 bp, Artificial Sequence
  Description of Artificial Sequence:  Hypothetical Probe Sequence
cagcggaccacgccatgctt

SEQ ID NO: 8036 - DNA, 20 bp, Artificial Sequence
  Description of Artificial Sequence:  Hypothetical Probe Sequence
cagcggaccagccctaccat

SEQ ID NO: 8037 - DNA, 20 bp, Artificial Sequence
  Description of Artificial Sequence:  Hypothetical Probe Sequence
cagcggacacggcgaactgt

SEQ ID NO: 8038 - DNA, 20 bp, Artificial Sequence
  Description of Artificial Sequence:  Hypothetical Probe Sequence
acggttgaaatccctaacgg

SEQ ID NO: 8039 - DNA, 20 bp, Artificial Sequence
  Description of Artificial Sequence:  Hypothetical Probe Sequence
cagcacggtgatgatgcgtt

SEQ ID NO: 8040 - DNA, 20 bp, Artificial Sequence
  Description of Artificial Sequence:  Hypothetical Probe Sequence
acggaatctctgggtatgcg

SEQ ID NO: 8041 - DNA, 20 bp, Artificial Sequence
  Description of Artificial Sequence:  Hypothetical Probe Sequence
cagcacggatacaaagcacg

SEQ ID NO: 8042 - DNA, 20 bp, Artificial Sequence
  Description of Artificial Sequence:  Hypothetical Probe Sequence
cagcacggctgtgaccgctt

SEQ ID NO: 8043 - DNA, 20 bp, Artificial Sequence
  Description of Artificial Sequence:  Hypothetical Probe Sequence
cagcacggcgaagcttgatg

SEQ ID NO: 8044 - DNA, 20 bp, Artificial Sequence
  Description of Artificial Sequence:  Hypothetical Probe Sequence
acgggcttgtctcctatgcg

SEQ ID NO: 8045 - DNA, 20 bp, Artificial Sequence
  Description of Artificial Sequence:  Hypothetical Probe Sequence
cagcacggggtacgaatccc

SEQ ID NO: 8046 - DNA, 20 bp, Artificial Sequence
  Description of Artificial Sequence:  Hypothetical Probe Sequence
acgggagtatcgagtgagcc

SEQ ID NO: 8047 - DNA, 20 bp, Artificial Sequence
  Description of Artificial Sequence:  Hypothetical Probe Sequence
cagcacggaccttctgcgtt

SEQ ID NO: 8048 - DNA, 20 bp, Artificial Sequence
  Description of Artificial Sequence:  Hypothetical Probe Sequence
cagcacggatcgtcccagtg

SEQ ID NO: 8049 - DNA, 20 bp, Artificial Sequence
  Description of Artificial Sequence:  Hypothetical Probe Sequence
acggaggaacctgagtgcaa

SEQ ID NO: 8050 - DNA, 20 bp, Artificial Sequence
  Description of Artificial Sequence:  Hypothetical Probe Sequence
cagcacggagccacctgtgc

SEQ ID NO: 8051 - DNA, 20 bp, Artificial Sequence
  Description of Artificial Sequence:  Hypothetical Probe Sequence
agcctgataaagagccacgg

SEQ ID NO: 8052 - DNA, 20 bp, Artificial Sequence
  Description of Artificial Sequence:  Hypothetical Probe Sequence
cagcagccaatccttggtgc

SEQ ID NO: 8053 - DNA, 20 bp, Artificial Sequence
  Description of Artificial Sequence:  Hypothetical Probe Sequence
cagcagcctctgtcgtggac

SEQ ID NO: 8054 - DNA, 20 bp, Artificial Sequence
  Description of Artificial Sequence:  Hypothetical Probe Sequence
cagcagcctgtcgtgcgcaa

SEQ ID NO: 8055 - DNA, 20 bp, Artificial Sequence
  Description of Artificial Sequence:  Hypothetical Probe Sequence
cagcagcccgttcctaagga

SEQ ID NO: 8056 - DNA, 20 bp, Artificial Sequence
  Description of Artificial Sequence:  Hypothetical Probe Sequence
cagcagccgtctcttgctca

SEQ ID NO: 8057 - DNA, 20 bp, Artificial Sequence
  Description of Artificial Sequence:  Hypothetical Probe Sequence
agccgagtgagtcacgcgtt

SEQ ID NO: 8058 - DNA, 20 bp, Artificial Sequence
  Description of Artificial Sequence:  Hypothetical Probe Sequence
agccacctgatgtgtcgcaa

SEQ ID NO: 8059 - DNA, 20 bp, Artificial Sequence
  Description of Artificial Sequence:  Hypothetical Probe Sequence
cagcagccgatgatcgctca

SEQ ID NO: 8060 - DNA, 20 bp, Artificial Sequence
  Description of Artificial Sequence:  Hypothetical Probe Sequence
cagcagccgacctacatccc

SEQ ID NO: 8061 - DNA, 20 bp, Artificial Sequence
  Description of Artificial Sequence:  Hypothetical Probe Sequence
ttaggcaaacggcacgcgaa

SEQ ID NO: 8062 - DNA, 20 bp, Artificial Sequence
  Description of Artificial Sequence:  Hypothetical Probe Sequence
aatccgaacgaacgaaacgg

SEQ ID NO: 8063 - DNA, 20 bp, Artificial Sequence
  Description of Artificial Sequence:  Hypothetical Probe Sequence
gaccaatcggacgtgcggac

SEQ ID NO: 8064 - DNA, 20 bp, Artificial Sequence
  Description of Artificial Sequence:  Hypothetical Probe Sequence
aaagcgttagccctgtcagc

SEQ ID NO: 8065 - DNA, 20 bp, Artificial Sequence
  Description of Artificial Sequence:  Hypothetical Probe Sequence
aaagatcgcgttgtgctgcg

SEQ ID NO: 8066 - DNA, 20 bp, Artificial Sequence
  Description of Artificial Sequence:  Hypothetical Probe Sequence
aaaggatgcacggacctgcg

SEQ ID NO: 8067 - DNA, 20 bp, Artificial Sequence
  Description of Artificial Sequence:  Hypothetical Probe Sequence
aaagggacgaccaggaacgg

SEQ ID NO: 8068 - DNA, 20 bp, Artificial Sequence
  Description of Artificial Sequence:  Hypothetical Probe Sequence
tctggtgccagcgcttggac

SEQ ID NO: 8069 - DNA, 20 bp, Artificial Sequence
  Description of Artificial Sequence:  Hypothetical Probe Sequence
tctgacggcgtttcgttccc

SEQ ID NO: 8070 - DNA, 20 bp, Artificial Sequence
  Description of Artificial Sequence:  Hypothetical Probe Sequence
tgtcgtgcaaagccatgacc

SEQ ID NO: 8071 - DNA, 20 bp, Artificial Sequence
  Description of Artificial Sequence:  Hypothetical Probe Sequence
tcgtcgaatgcggtctgtgc

SEQ ID NO: 8072 - DNA, 20 bp, Artificial Sequence
  Description of Artificial Sequence:  Hypothetical Probe Sequence
tcgtggtatcccgtgcgagt

SEQ ID NO: 8073 - DNA, 20 bp, Artificial Sequence
  Description of Artificial Sequence:  Hypothetical Probe Sequence
tcgtcacggcttacggctgt

SEQ ID NO: 8074 - DNA, 20 bp, Artificial Sequence
  Description of Artificial Sequence:  Hypothetical Probe Sequence
cttgcgaatcgttacatgcg

SEQ ID NO: 8075 - DNA, 20 bp, Artificial Sequence
  Description of Artificial Sequence:  Hypothetical Probe Sequence
gacccttgggtaccattccc

SEQ ID NO: 8076 - DNA, 20 bp, Artificial Sequence
  Description of Artificial Sequence:  Hypothetical Probe Sequence
cttgcagccctacagccagc

SEQ ID NO: 8077 - DNA, 20 bp, Artificial Sequence
  Description of Artificial Sequence:  Hypothetical Probe Sequence
gacccgtttacagtgcggac

SEQ ID NO: 8078 - DNA, 20 bp, Artificial Sequence
  Description of Artificial Sequence:  Hypothetical Probe Sequence
gacccgtttctgcacggtct

SEQ ID NO: 8079 - DNA, 20 bp, Artificial Sequence
  Description of Artificial Sequence:  Hypothetical Probe Sequence
gacccgttctcagctttccc

SEQ ID NO: 8080 - DNA, 20 bp, Artificial Sequence
  Description of Artificial Sequence:  Hypothetical Probe Sequence
cgttggtacagcaatctgcg

SEQ ID NO: 8081 - DNA, 20 bp, Artificial Sequence
  Description of Artificial Sequence:  Hypothetical Probe Sequence
cgttagtgttgatgcgcacg

SEQ ID NO: 8082 - DNA, 20 bp, Artificial Sequence
  Description of Artificial Sequence:  Hypothetical Probe Sequence
gacccgttaggatcccccat

SEQ ID NO: 8083 - DNA, 20 bp, Artificial Sequence
  Description of Artificial Sequence:  Hypothetical Probe Sequence
gacccgttgatgatcgcagc

SEQ ID NO: 8084 - DNA, 20 bp, Artificial Sequence
  Description of Artificial Sequence:  Hypothetical Probe Sequence
cgtttgcgaatctgtcgctt

SEQ ID NO: 8085 - DNA, 20 bp, Artificial Sequence
  Description of Artificial Sequence:  Hypothetical Probe Sequence
gacccgttcacgtgatgctt

SEQ ID NO: 8086 - DNA, 20 bp, Artificial Sequence
  Description of Artificial Sequence:  Hypothetical Probe Sequence
cgttcagcggtatctgtgcg

SEQ ID NO: 8087 - DNA, 20 bp, Artificial Sequence
  Description of Artificial Sequence:  Hypothetical Probe Sequence
gacccgttgtgcggacacct

SEQ ID NO: 8088 - DNA, 20 bp, Artificial Sequence
  Description of Artificial Sequence:  Hypothetical Probe Sequence
gaccctgtgcaaggtatgcg

SEQ ID NO: 8089 - DNA, 20 bp, Artificial Sequence
  Description of Artificial Sequence:  Hypothetical Probe Sequence
ccatttgagcaagtgcgacc

SEQ ID NO: 8090 - DNA, 20 bp, Artificial Sequence
  Description of Artificial Sequence:  Hypothetical Probe Sequence
ccatggtacttgtgcgcacg

SEQ ID NO: 8091 - DNA, 20 bp, Artificial Sequence
  Description of Artificial Sequence:  Hypothetical Probe Sequence
ccatcacggagtgacctgcg

SEQ ID NO: 8092 - DNA, 20 bp, Artificial Sequence
  Description of Artificial Sequence:  Hypothetical Probe Sequence
gaccccatacggggtacacg

SEQ ID NO: 8093 - DNA, 20 bp, Artificial Sequence
  Description of Artificial Sequence:  Hypothetical Probe Sequence
cgaattgaaggatccccgtt

SEQ ID NO: 8094 - DNA, 20 bp, Artificial Sequence
  Description of Artificial Sequence:  Hypothetical Probe Sequence
cgaaggtaccatcgaaagcc

SEQ ID NO: 8095 - DNA, 20 bp, Artificial Sequence
  Description of Artificial Sequence:  Hypothetical Probe Sequence
gacccgaaatcggcttctca

SEQ ID NO: 8096 - DNA, 20 bp, Artificial Sequence
  Description of Artificial Sequence:  Hypothetical Probe Sequence
gacccgaaacgggcttagga

SEQ ID NO: 8097 - DNA, 20 bp, Artificial Sequence
  Description of Artificial Sequence:  Hypothetical Probe Sequence
gaccgctttgatggtaatcg

SEQ ID NO: 8098 - DNA, 20 bp, Artificial Sequence
  Description of Artificial Sequence:  Hypothetical Probe Sequence
gctttgtcggaccagcgtgc

SEQ ID NO: 8099 - DNA, 20 bp, Artificial Sequence
  Description of Artificial Sequence:  Hypothetical Probe Sequence
gcttctgtccatgagttgcg

SEQ ID NO: 8100 - DNA, 20 bp, Artificial Sequence
  Description of Artificial Sequence:  Hypothetical Probe Sequence
gaccgcttgcttacggaaag

SEQ ID NO: 8101 - DNA, 20 bp, Artificial Sequence
  Description of Artificial Sequence:  Hypothetical Probe Sequence
gcttatcgaatcggtatgcg

SEQ ID NO: 8102 - DNA, 20 bp, Artificial Sequence
  Description of Artificial Sequence:  Hypothetical Probe Sequence
gaccgcttcctaaggaagcc

SEQ ID NO: 8103 - DNA, 20 bp, Artificial Sequence
  Description of Artificial Sequence:  Hypothetical Probe Sequence
gaccgctttgcgtcgtgtgc

SEQ ID NO: 8104 - DNA, 20 bp, Artificial Sequence
  Description of Artificial Sequence:  Hypothetical Probe Sequence
gaccgcttgtgcaatccgtt

SEQ ID NO: 8105 - DNA, 20 bp, Artificial Sequence
  Description of Artificial Sequence:  Hypothetical Probe Sequence
gaccggtattgatgcgacgg

SEQ ID NO: 8106 - DNA, 20 bp, Artificial Sequence
  Description of Artificial Sequence:  Hypothetical Probe Sequence
ggtacgttggacctcatgcg

SEQ ID NO: 8107 - DNA, 20 bp, Artificial Sequence
  Description of Artificial Sequence:  Hypothetical Probe Sequence
gaccggtacgaagaccggac

SEQ ID NO: 8108 - DNA, 20 bp, Artificial Sequence
  Description of Artificial Sequence:  Hypothetical Probe Sequence
ggtagcttcacgaatcgcaa

SEQ ID NO: 8109 - DNA, 20 bp, Artificial Sequence
  Description of Artificial Sequence:  Hypothetical Probe Sequence
ggtaggtagctttccccacg

SEQ ID NO: 8110 - DNA, 20 bp, Artificial Sequence
  Description of Artificial Sequence:  Hypothetical Probe Sequence
gaccggtaaggaaggaacgg

SEQ ID NO: 8111 - DNA, 20 bp, Artificial Sequence
  Description of Artificial Sequence:  Hypothetical Probe Sequence
gaccggtatgcgtgcgtgat

SEQ ID NO: 8112 - DNA, 20 bp, Artificial Sequence
  Description of Artificial Sequence:  Hypothetical Probe Sequence
gtcttcgtttgaagccgcaa

SEQ ID NO: 8113 - DNA, 20 bp, Artificial Sequence
  Description of Artificial Sequence:  Hypothetical Probe Sequence
gaccgtctcgaacagcatcg

SEQ ID NO: 8114 - DNA, 20 bp, Artificial Sequence
  Description of Artificial Sequence:  Hypothetical Probe Sequence
gtctgctttgatggacgctt

SEQ ID NO: 8115 - DNA, 20 bp, Artificial Sequence
  Description of Artificial Sequence:  Hypothetical Probe Sequence
gaccgtctgaccgtgccttg

SEQ ID NO: 8116 - DNA, 20 bp, Artificial Sequence
  Description of Artificial Sequence:  Hypothetical Probe Sequence
gagtggtaaaagacggcagc

SEQ ID NO: 8117 - DNA, 20 bp, Artificial Sequence
  Description of Artificial Sequence:  Hypothetical Probe Sequence
gaccgagtgtgccgttgcaa

SEQ ID NO: 8118 - DNA, 20 bp, Artificial Sequence
  Description of Artificial Sequence:  Hypothetical Probe Sequence
gaccgagtggacacggtcgt

SEQ ID NO: 8119 - DNA, 20 bp, Artificial Sequence
  Description of Artificial Sequence:  Hypothetical Probe Sequence
gaccgagtagccgatgcagc

SEQ ID NO: 8120 - DNA, 20 bp, Artificial Sequence
  Description of Artificial Sequence:  Hypothetical Probe Sequence
gaccgcaatgatacggcgaa

SEQ ID NO: 8121 - DNA, 20 bp, Artificial Sequence
  Description of Artificial Sequence:  Hypothetical Probe Sequence
gcaaaatctgtcctgttgcg

SEQ ID NO: 8122 - DNA, 20 bp, Artificial Sequence
  Description of Artificial Sequence:  Hypothetical Probe Sequence
gaccgcaatctgtgattccc

SEQ ID NO: 8123 - DNA, 20 bp, Artificial Sequence
  Description of Artificial Sequence:  Hypothetical Probe Sequence
gaccgcaacttgtgatgtgc

SEQ ID NO: 8124 - DNA, 20 bp, Artificial Sequence
  Description of Artificial Sequence:  Hypothetical Probe Sequence
gaccgcaagcttttgatccc

SEQ ID NO: 8125 - DNA, 20 bp, Artificial Sequence
  Description of Artificial Sequence:  Hypothetical Probe Sequence
gaccgcaagtctcacgcgtt

SEQ ID NO: 8126 - DNA, 20 bp, Artificial Sequence
  Description of Artificial Sequence:  Hypothetical Probe Sequence
gcaagagttgatggacacgg

SEQ ID NO: 8127 - DNA, 20 bp, Artificial Sequence
  Description of Artificial Sequence:  Hypothetical Probe Sequence
gaccgcaaagtggatggatg

SEQ ID NO: 8128 - DNA, 20 bp, Artificial Sequence
  Description of Artificial Sequence:  Hypothetical Probe Sequence
gaccgcaatcccccattccc

SEQ ID NO: 8129 - DNA, 20 bp, Artificial Sequence
  Description of Artificial Sequence:  Hypothetical Probe Sequence
agtgtgcggagtgaccgcaa

SEQ ID NO: 8130 - DNA, 20 bp, Artificial Sequence
  Description of Artificial Sequence:  Hypothetical Probe Sequence
agtgcacgctcacacggcaa

SEQ ID NO: 8131 - DNA, 20 bp, Artificial Sequence
  Description of Artificial Sequence:  Hypothetical Probe Sequence
agtgagccgaccgacccgtt

SEQ ID NO: 8132 - DNA, 20 bp, Artificial Sequence
  Description of Artificial Sequence:  Hypothetical Probe Sequence
acctcacggatgccatcacg

SEQ ID NO: 8133 - DNA, 20 bp, Artificial Sequence
  Description of Artificial Sequence:  Hypothetical Probe Sequence
acctacgggcttagcccgaa

SEQ ID NO: 8134 - DNA, 20 bp, Artificial Sequence
  Description of Artificial Sequence:  Hypothetical Probe Sequence
gaccatcgctcaagccctca

SEQ ID NO: 8135 - DNA, 20 bp, Artificial Sequence
  Description of Artificial Sequence:  Hypothetical Probe Sequence
gaccatcgcgaatcccctgt

SEQ ID NO: 8136 - DNA, 20 bp, Artificial Sequence
  Description of Artificial Sequence:  Hypothetical Probe Sequence
gaccaggaccatacggccat

SEQ ID NO: 8137 - DNA, 20 bp, Artificial Sequence
  Description of Artificial Sequence:  Hypothetical Probe Sequence
aggaatcgcgaagatggacc

SEQ ID NO: 8138 - DNA, 20 bp, Artificial Sequence
  Description of Artificial Sequence:  Hypothetical Probe Sequence
aggatcccgcttgagttccc

SEQ ID NO: 8139 - DNA, 20 bp, Artificial Sequence
  Description of Artificial Sequence:  Hypothetical Probe Sequence
aggagtgccttggcttgcaa

SEQ ID NO: 8140 - DNA, 20 bp, Artificial Sequence
  Description of Artificial Sequence:  Hypothetical Probe Sequence
cctacttgccatcacggtgc

SEQ ID NO: 8141 - DNA, 20 bp, Artificial Sequence
  Description of Artificial Sequence:  Hypothetical Probe Sequence
gacccctacgttaggaacgg

SEQ ID NO: 8142 - DNA, 20 bp, Artificial Sequence
  Description of Artificial Sequence:  Hypothetical Probe Sequence
cctacgaaggtaagcccagc

SEQ ID NO: 8143 - DNA, 20 bp, Artificial Sequence
  Description of Artificial Sequence:  Hypothetical Probe Sequence
cctagcaacacgacggagcc

SEQ ID NO: 8144 - DNA, 20 bp, Artificial Sequence
  Description of Artificial Sequence:  Hypothetical Probe Sequence
cctagtgctgtcaggatgcg

SEQ ID NO: 8145 - DNA, 20 bp, Artificial Sequence
  Description of Artificial Sequence:  Hypothetical Probe Sequence
gacccctaggacagccgcaa

SEQ ID NO: 8146 - DNA, 20 bp, Artificial Sequence
  Description of Artificial Sequence:  Hypothetical Probe Sequence
gaccgatgatcgtgcgccta

SEQ ID NO: 8147 - DNA, 20 bp, Artificial Sequence
  Description of Artificial Sequence:  Hypothetical Probe Sequence
gaccgatgaggaatcgggac

SEQ ID NO: 8148 - DNA, 20 bp, Artificial Sequence
  Description of Artificial Sequence:  Hypothetical Probe Sequence
gaccgatgtgcgtcgtatcg

SEQ ID NO: 8149 - DNA, 20 bp, Artificial Sequence
  Description of Artificial Sequence:  Hypothetical Probe Sequence
gaccgatgcagccctacacg

SEQ ID NO: 8150 - DNA, 20 bp, Artificial Sequence
  Description of Artificial Sequence:  Hypothetical Probe Sequence
gaccgatggtgccagcagga

SEQ ID NO: 8151 - DNA, 20 bp, Artificial Sequence
  Description of Artificial Sequence:  Hypothetical Probe Sequence
gaccgatgagcctctgggta

SEQ ID NO: 8152 - DNA, 20 bp, Artificial Sequence
  Description of Artificial Sequence:  Hypothetical Probe Sequence
tcccaaagcgaagatgcgtt

SEQ ID NO: 8153 - DNA, 20 bp, Artificial Sequence
  Description of Artificial Sequence:  Hypothetical Probe Sequence
tcccagtggtgcgctttcgt

SEQ ID NO: 8154 - DNA, 20 bp, Artificial Sequence
  Description of Artificial Sequence:  Hypothetical Probe Sequence
tcccaccttacacgaatgcg

SEQ ID NO: 8155 - DNA, 20 bp, Artificial Sequence
  Description of Artificial Sequence:  Hypothetical Probe Sequence
gacctcccggactctgcgaa

SEQ ID NO: 8156 - DNA, 20 bp, Artificial Sequence
  Description of Artificial Sequence:  Hypothetical Probe Sequence
gacctcccagcccgttgctt

SEQ ID NO: 8157 - DNA, 20 bp, Artificial Sequence
  Description of Artificial Sequence:  Hypothetical Probe Sequence
tgcgttgagtctacggcgaa

SEQ ID NO: 8158 - DNA, 20 bp, Artificial Sequence
  Description of Artificial Sequence:  Hypothetical Probe Sequence
tgcgtcgtacctgatggacc

SEQ ID NO: 8159 - DNA, 20 bp, Artificial Sequence
  Description of Artificial Sequence:  Hypothetical Probe Sequence
tgcggagtctgtatcgacgg

SEQ ID NO: 8160 - DNA, 20 bp, Artificial Sequence
  Description of Artificial Sequence:  Hypothetical Probe Sequence
tgcgatcggtctaccttgcg

SEQ ID NO: 8161 - DNA, 20 bp, Artificial Sequence
  Description of Artificial Sequence:  Hypothetical Probe Sequence
tgcgcctaaggaaaagagcc

SEQ ID NO: 8162 - DNA, 20 bp, Artificial Sequence
  Description of Artificial Sequence:  Hypothetical Probe Sequence
tgcgtgcgcgtttgtcagga

SEQ ID NO: 8163 - DNA, 20 bp, Artificial Sequence
  Description of Artificial Sequence:  Hypothetical Probe Sequence
gacctgcggtgccacgagga

SEQ ID NO: 8164 - DNA, 20 bp, Artificial Sequence
  Description of Artificial Sequence:  Hypothetical Probe Sequence
cacgttagggacgatggcaa

SEQ ID NO: 8165 - DNA, 20 bp, Artificial Sequence
  Description of Artificial Sequence:  Hypothetical Probe Sequence
cacgtgtcccatgacccagc

SEQ ID NO: 8166 - DNA, 20 bp, Artificial Sequence
  Description of Artificial Sequence:  Hypothetical Probe Sequence
gacccacgctgtcagcgtct

SEQ ID NO: 8167 - DNA, 20 bp, Artificial Sequence
  Description of Artificial Sequence:  Hypothetical Probe Sequence
gacccacgcctatcgtctca

SEQ ID NO: 8168 - DNA, 20 bp, Artificial Sequence
  Description of Artificial Sequence:  Hypothetical Probe Sequence
gacccacgagccgcaagacc

SEQ ID NO: 8169 - DNA, 20 bp, Artificial Sequence
  Description of Artificial Sequence:  Hypothetical Probe Sequence
cagcttgatacatgcgcgaa

SEQ ID NO: 8170 - DNA, 20 bp, Artificial Sequence
  Description of Artificial Sequence:  Hypothetical Probe Sequence
cagcataccttggcaatgcg

SEQ ID NO: 8171 - DNA, 20 bp, Artificial Sequence
  Description of Artificial Sequence:  Hypothetical Probe Sequence
cagctacacttggtgccgtt

SEQ ID NO: 8172 - DNA, 20 bp, Artificial Sequence
  Description of Artificial Sequence:  Hypothetical Probe Sequence
gacccagcggtagctttgtc

SEQ ID NO: 8173 - DNA, 20 bp, Artificial Sequence
  Description of Artificial Sequence:  Hypothetical Probe Sequence
cagcagtggaccaaagcgaa

SEQ ID NO: 8174 - DNA, 20 bp, Artificial Sequence
  Description of Artificial Sequence:  Hypothetical Probe Sequence
cagcgatgccattgtcccat

SEQ ID NO: 8175 - DNA, 20 bp, Artificial Sequence
  Description of Artificial Sequence:  Hypothetical Probe Sequence
cagcgtgcaggatgtcgtgc

SEQ ID NO: 8176 - DNA, 20 bp, Artificial Sequence
  Description of Artificial Sequence:  Hypothetical Probe Sequence
gacccagcagccgcaaaatc

SEQ ID NO: 8177 - DNA, 20 bp, Artificial Sequence
  Description of Artificial Sequence:  Hypothetical Probe Sequence
gaccgacctgatagccccat

SEQ ID NO: 8178 - DNA, 20 bp, Artificial Sequence
  Description of Artificial Sequence:  Hypothetical Probe Sequence
gaccaaaggtctgaccgcaa

SEQ ID NO: 8179 - DNA, 20 bp, Artificial Sequence
  Description of Artificial Sequence:  Hypothetical Probe Sequence
gaccgacctctgcgaaggac

SEQ ID NO: 8180 - DNA, 20 bp, Artificial Sequence
  Description of Artificial Sequence:  Hypothetical Probe Sequence
gaccgaccctgtaaagcagc

SEQ ID NO: 8181 - DNA, 20 bp, Artificial Sequence
  Description of Artificial Sequence:  Hypothetical Probe Sequence
gaccgaccacctgcaacgtt

SEQ ID NO: 8182 - DNA, 20 bp, Artificial Sequence
  Description of Artificial Sequence:  Hypothetical Probe Sequence
gaccgtgcctcatctgcacg

SEQ ID NO: 8183 - DNA, 20 bp, Artificial Sequence
  Description of Artificial Sequence:  Hypothetical Probe Sequence
gaccgtgcttaggcttacgg

SEQ ID NO: 8184 - DNA, 20 bp, Artificial Sequence
  Description of Artificial Sequence:  Hypothetical Probe Sequence
gtgcatactcgtcttgcagc

SEQ ID NO: 8185 - DNA, 20 bp, Artificial Sequence
  Description of Artificial Sequence:  Hypothetical Probe Sequence
gaccgtgccgaaggtaagtg

SEQ ID NO: 8186 - DNA, 20 bp, Artificial Sequence
  Description of Artificial Sequence:  Hypothetical Probe Sequence
gaccgtgcgtctctcaaaag

SEQ ID NO: 8187 - DNA, 20 bp, Artificial Sequence
  Description of Artificial Sequence:  Hypothetical Probe Sequence
gaccgtgcgcaatcgtgtct

SEQ ID NO: 8188 - DNA, 20 bp, Artificial Sequence
  Description of Artificial Sequence:  Hypothetical Probe Sequence
gaccgtgcagtgtctgtgcg

SEQ ID NO: 8189 - DNA, 20 bp, Artificial Sequence
  Description of Artificial Sequence:  Hypothetical Probe Sequence
gaccgtgcacctctcacgaa

SEQ ID NO: 8190 - DNA, 20 bp, Artificial Sequence
  Description of Artificial Sequence:  Hypothetical Probe Sequence
gaccgtgcaggaccatggac

SEQ ID NO: 8191 - DNA, 20 bp, Artificial Sequence
  Description of Artificial Sequence:  Hypothetical Probe Sequence
gaccgtgctgcggtctgcaa

SEQ ID NO: 8192 - DNA, 20 bp, Artificial Sequence
  Description of Artificial Sequence:  Hypothetical Probe Sequence
gaccgtgccacgctcacttg

SEQ ID NO: 8193 - DNA, 20 bp, Artificial Sequence
  Description of Artificial Sequence:  Hypothetical Probe Sequence
gaccgtgccagcctcatctg

SEQ ID NO: 8194 - DNA, 20 bp, Artificial Sequence
  Description of Artificial Sequence:  Hypothetical Probe Sequence
gaccgtgcgtgcgcttgagt

SEQ ID NO: 8195 - DNA, 20 bp, Artificial Sequence
  Description of Artificial Sequence:  Hypothetical Probe Sequence
gaccggaccgttcagcgatg

SEQ ID NO: 8196 - DNA, 20 bp, Artificial Sequence
  Description of Artificial Sequence:  Hypothetical Probe Sequence
gaccggacctgtggaccgtt

SEQ ID NO: 8197 - DNA, 20 bp, Artificial Sequence
  Description of Artificial Sequence:  Hypothetical Probe Sequence
ggaccgaaaatctgtcacgg

SEQ ID NO: 8198 - DNA, 20 bp, Artificial Sequence
  Description of Artificial Sequence:  Hypothetical Probe Sequence
gaccggacgcaagcaagcaa

SEQ ID NO: 8199 - DNA, 20 bp, Artificial Sequence
  Description of Artificial Sequence:  Hypothetical Probe Sequence
gaccggacatcgatcgatcg

SEQ ID NO: 8200 - DNA, 20 bp, Artificial Sequence
  Description of Artificial Sequence:  Hypothetical Probe Sequence
ggaccagcgtctcagcagcc

SEQ ID NO: 8201 - DNA, 20 bp, Artificial Sequence
  Description of Artificial Sequence:  Hypothetical Probe Sequence
gaccggacgaccctcacacg

SEQ ID NO: 8202 - DNA, 20 bp, Artificial Sequence
  Description of Artificial Sequence:  Hypothetical Probe Sequence
gaccggacgtgcctcaatcg

SEQ ID NO: 8203 - DNA, 20 bp, Artificial Sequence
  Description of Artificial Sequence:  Hypothetical Probe Sequence
gaccggacacgggtctgctt

SEQ ID NO: 8204 - DNA, 20 bp, Artificial Sequence
  Description of Artificial Sequence:  Hypothetical Probe Sequence
acggtcgtaatcgatgtccc

SEQ ID NO: 8205 - DNA, 20 bp, Artificial Sequence
  Description of Artificial Sequence:  Hypothetical Probe Sequence
acggcttgatcgtgatgctt

SEQ ID NO: 8206 - DNA, 20 bp, Artificial Sequence
  Description of Artificial Sequence:  Hypothetical Probe Sequence
gaccacggcgttgtctgtgc

SEQ ID NO: 8207 - DNA, 20 bp, Artificial Sequence
  Description of Artificial Sequence:  Hypothetical Probe Sequence
acggctgtataccacgtgcg

SEQ ID NO: 8208 - DNA, 20 bp, Artificial Sequence
  Description of Artificial Sequence:  Hypothetical Probe Sequence
acggggtattagacggcttg

SEQ ID NO: 8209 - DNA, 20 bp, Artificial Sequence
  Description of Artificial Sequence:  Hypothetical Probe Sequence
acgggtctaggatgtcgctt

SEQ ID NO: 8210 - DNA, 20 bp, Artificial Sequence
  Description of Artificial Sequence:  Hypothetical Probe Sequence
acgggagtatacagccgtgc

SEQ ID NO: 8211 - DNA, 20 bp, Artificial Sequence
  Description of Artificial Sequence:  Hypothetical Probe Sequence
acggcagctcgtttagagcc

SEQ ID NO: 8212 - DNA, 20 bp, Artificial Sequence
  Description of Artificial Sequence:  Hypothetical Probe Sequence
gaccacggagccagccacct

SEQ ID NO: 8213 - DNA, 20 bp, Artificial Sequence
  Description of Artificial Sequence:  Hypothetical Probe Sequence
gaccagccaatcacggctgt

SEQ ID NO: 8214 - DNA, 20 bp, Artificial Sequence
  Description of Artificial Sequence:  Hypothetical Probe Sequence
gaccagccaaagcgttgcaa

SEQ ID NO: 8215 - DNA, 20 bp, Artificial Sequence
  Description of Artificial Sequence:  Hypothetical Probe Sequence
agcctcgtccataatcacgg

SEQ ID NO: 8216 - DNA, 20 bp, Artificial Sequence
  Description of Artificial Sequence:  Hypothetical Probe Sequence
gaccagccccatgcttcgtt

SEQ ID NO: 8217 - DNA, 20 bp, Artificial Sequence
  Description of Artificial Sequence:  Hypothetical Probe Sequence
gaccagccgcttcgaactca

SEQ ID NO: 8218 - DNA, 20 bp, Artificial Sequence
  Description of Artificial Sequence:  Hypothetical Probe Sequence
agccagtgagccagccccat

SEQ ID NO: 8219 - DNA, 20 bp, Artificial Sequence
  Description of Artificial Sequence:  Hypothetical Probe Sequence
agccatcgtacaatcgcgtt

SEQ ID NO: 8220 - DNA, 20 bp, Artificial Sequence
  Description of Artificial Sequence:  Hypothetical Probe Sequence
gaccagcccctaaatctgcg

SEQ ID NO: 8221 - DNA, 20 bp, Artificial Sequence
  Description of Artificial Sequence:  Hypothetical Probe Sequence
agcctcccggacagtgccat

SEQ ID NO: 8222 - DNA, 20 bp, Artificial Sequence
  Description of Artificial Sequence:  Hypothetical Probe Sequence
gaccagcctgcgtgtccgtt

SEQ ID NO: 8223 - DNA, 20 bp, Artificial Sequence
  Description of Artificial Sequence:  Hypothetical Probe Sequence
gaccagccgaccgatgctca

SEQ ID NO: 8224 - DNA, 20 bp, Artificial Sequence
  Description of Artificial Sequence:  Hypothetical Probe Sequence
ttgagcttatcggcaatgcg

SEQ ID NO: 8225 - DNA, 20 bp, Artificial Sequence
  Description of Artificial Sequence:  Hypothetical Probe Sequence
ttgagtgcgtgctgcgcgaa

SEQ ID NO: 8226 - DNA, 20 bp, Artificial Sequence
  Description of Artificial Sequence:  Hypothetical Probe Sequence
tgatccatgtgccttgacgg

SEQ ID NO: 8227 - DNA, 20 bp, Artificial Sequence
  Description of Artificial Sequence:  Hypothetical Probe Sequence
tgatgtgccgtttgcgggac

SEQ ID NO: 8228 - DNA, 20 bp, Artificial Sequence
  Description of Artificial Sequence:  Hypothetical Probe Sequence
gtgcaatccgaacgttggac

SEQ ID NO: 8229 - DNA, 20 bp, Artificial Sequence
  Description of Artificial Sequence:  Hypothetical Probe Sequence
gtgcaatcggtatcgtcgaa

SEQ ID NO: 8230 - DNA, 20 bp, Artificial Sequence
  Description of Artificial Sequence:  Hypothetical Probe Sequence
gtgcaatcgatgagccccat

SEQ ID NO: 8231 - DNA, 20 bp, Artificial Sequence
  Description of Artificial Sequence:  Hypothetical Probe Sequence
aatctcccgcaaatactgcg

SEQ ID NO: 8232 - DNA, 20 bp, Artificial Sequence
  Description of Artificial Sequence:  Hypothetical Probe Sequence
gtgcaatccacggatgtctg

SEQ ID NO: 8233 - DNA, 20 bp, Artificial Sequence
  Description of Artificial Sequence:  Hypothetical Probe Sequence
gtgcaatccagcagcccacg

SEQ ID NO: 8234 - DNA, 20 bp, Artificial Sequence
  Description of Artificial Sequence:  Hypothetical Probe Sequence
gtgcataccacggcaaatcg

SEQ ID NO: 8235 - DNA, 20 bp, Artificial Sequence
  Description of Artificial Sequence:  Hypothetical Probe Sequence
gtgcatacagccacggtgcg

SEQ ID NO: 8236 - DNA, 20 bp, Artificial Sequence
  Description of Artificial Sequence:  Hypothetical Probe Sequence
aaagtcgtcgaacacgcgaa

SEQ ID NO: 8237 - DNA, 20 bp, Artificial Sequence
  Description of Artificial Sequence:  Hypothetical Probe Sequence
gtgcaaagcctaatcggcaa

SEQ ID NO: 8238 - DNA, 20 bp, Artificial Sequence
  Description of Artificial Sequence:  Hypothetical Probe Sequence
aaagcagccagcagtgagcc

SEQ ID NO: 8239 - DNA, 20 bp, Artificial Sequence
  Description of Artificial Sequence:  Hypothetical Probe Sequence
gtgcaaaggaccatcggctt

SEQ ID NO: 8240 - DNA, 20 bp, Artificial Sequence
  Description of Artificial Sequence:  Hypothetical Probe Sequence
tctgggtaatcgggactgcg

SEQ ID NO: 8241 - DNA, 20 bp, Artificial Sequence
  Description of Artificial Sequence:  Hypothetical Probe Sequence
tctgcctagctttgcgcacg

SEQ ID NO: 8242 - DNA, 20 bp, Artificial Sequence
  Description of Artificial Sequence:  Hypothetical Probe Sequence
tctgtgcgcgttagtgcgaa

SEQ ID NO: 8243 - DNA, 20 bp, Artificial Sequence
  Description of Artificial Sequence:  Hypothetical Probe Sequence
gtgctgtccgaaacggctgt

SEQ ID NO: 8244 - DNA, 20 bp, Artificial Sequence
  Description of Artificial Sequence:  Hypothetical Probe Sequence
gtgctgtccacgggacacgg

SEQ ID NO: 8245 - DNA, 20 bp, Artificial Sequence
  Description of Artificial Sequence:  Hypothetical Probe Sequence
tgtcgaccgacccagcctca

SEQ ID NO: 8246 - DNA, 20 bp, Artificial Sequence
  Description of Artificial Sequence:  Hypothetical Probe Sequence
tgtcacgggtcttcccggac

SEQ ID NO: 8247 - DNA, 20 bp, Artificial Sequence
  Description of Artificial Sequence:  Hypothetical Probe Sequence
tcgttgatagccgcttcacg

SEQ ID NO: 8248 - DNA, 20 bp, Artificial Sequence
  Description of Artificial Sequence:  Hypothetical Probe Sequence
tcgtcttgtgtcacggcgaa

SEQ ID NO: 8249 - DNA, 20 bp, Artificial Sequence
  Description of Artificial Sequence:  Hypothetical Probe Sequence
tcgtaggaaatcagccgcaa

SEQ ID NO: 8250 - DNA, 20 bp, Artificial Sequence
  Description of Artificial Sequence:  Hypothetical Probe Sequence
tcgttccccgttttgacacg

SEQ ID NO: 8251 - DNA, 20 bp, Artificial Sequence
  Description of Artificial Sequence:  Hypothetical Probe Sequence
tcgtggacggacgcttccat

SEQ ID NO: 8252 - DNA, 20 bp, Artificial Sequence
  Description of Artificial Sequence:  Hypothetical Probe Sequence
tcgtagcctctgacggggac

SEQ ID NO: 8253 - DNA, 20 bp, Artificial Sequence
  Description of Artificial Sequence:  Hypothetical Probe Sequence
gtgccttgttgatcccgtgc

SEQ ID NO: 8254 - DNA, 20 bp, Artificial Sequence
  Description of Artificial Sequence:  Hypothetical Probe Sequence
cttgaaaggcaacttgcgaa

SEQ ID NO: 8255 - DNA, 20 bp, Artificial Sequence
  Description of Artificial Sequence:  Hypothetical Probe Sequence
gtgccttggtctggactgcg

SEQ ID NO: 8256 - DNA, 20 bp, Artificial Sequence
  Description of Artificial Sequence:  Hypothetical Probe Sequence
gtgccttgaggagtgctccc

SEQ ID NO: 8257 - DNA, 20 bp, Artificial Sequence
  Description of Artificial Sequence:  Hypothetical Probe Sequence
gtgccttgcctatcgtatcg

SEQ ID NO: 8258 - DNA, 20 bp, Artificial Sequence
  Description of Artificial Sequence:  Hypothetical Probe Sequence
gtgccttggatggcttcgaa

SEQ ID NO: 8259 - DNA, 20 bp, Artificial Sequence
  Description of Artificial Sequence:  Hypothetical Probe Sequence
gtgccttgcagctgtcagtg

SEQ ID NO: 8260 - DNA, 20 bp, Artificial Sequence
  Description of Artificial Sequence:  Hypothetical Probe Sequence
cgttttgaaggagacctgcg

SEQ ID NO: 8261 - DNA, 20 bp, Artificial Sequence
  Description of Artificial Sequence:  Hypothetical Probe Sequence
cgttttagatcggatgcgaa

SEQ ID NO: 8262 - DNA, 20 bp, Artificial Sequence
  Description of Artificial Sequence:  Hypothetical Probe Sequence
cgtttctgtgcgatacgctt

SEQ ID NO: 8263 - DNA, 20 bp, Artificial Sequence
  Description of Artificial Sequence:  Hypothetical Probe Sequence
cgttctgtaatcgtgcagcc

SEQ ID NO: 8264 - DNA, 20 bp, Artificial Sequence
  Description of Artificial Sequence:  Hypothetical Probe Sequence
gtgccgttccatttgacacg

SEQ ID NO: 8265 - DNA, 20 bp, Artificial Sequence
  Description of Artificial Sequence:  Hypothetical Probe Sequence
gtgccgttggtagacccgtt

SEQ ID NO: 8266 - DNA, 20 bp, Artificial Sequence
  Description of Artificial Sequence:  Hypothetical Probe Sequence
gtgccgttgagtagccgcaa

SEQ ID NO: 8267 - DNA, 20 bp, Artificial Sequence
  Description of Artificial Sequence:  Hypothetical Probe Sequence
gtgccgttgatgtctggctt

SEQ ID NO: 8268 - DNA, 20 bp, Artificial Sequence
  Description of Artificial Sequence:  Hypothetical Probe Sequence
cgtttcccttagtccccagc

SEQ ID NO: 8269 - DNA, 20 bp, Artificial Sequence
  Description of Artificial Sequence:  Hypothetical Probe Sequence
gtgccgttggacgaccaatc

SEQ ID NO: 8270 - DNA, 20 bp, Artificial Sequence
  Description of Artificial Sequence:  Hypothetical Probe Sequence
ctcattgacacgggtatgcg

SEQ ID NO: 8271 - DNA, 20 bp, Artificial Sequence
  Description of Artificial Sequence:  Hypothetical Probe Sequence
gtgcctcaccatagcccgtt

SEQ ID NO: 8272 - DNA, 20 bp, Artificial Sequence
  Description of Artificial Sequence:  Hypothetical Probe Sequence
ctcaagtgggaccagccacg

SEQ ID NO: 8273 - DNA, 20 bp, Artificial Sequence
  Description of Artificial Sequence:  Hypothetical Probe Sequence
gtgcctcacctacttgacgg

SEQ ID NO: 8274 - DNA, 20 bp, Artificial Sequence
  Description of Artificial Sequence:  Hypothetical Probe Sequence
ctcatccctgatgatgcacg

SEQ ID NO: 8275 - DNA, 20 bp, Artificial Sequence
  Description of Artificial Sequence:  Hypothetical Probe Sequence
ctcaagcctgatggacgtgc

SEQ ID NO: 8276 - DNA, 20 bp, Artificial Sequence
  Description of Artificial Sequence:  Hypothetical Probe Sequence
ctgttctgtgcgtcccgtgc

SEQ ID NO: 8277 - DNA, 20 bp, Artificial Sequence
  Description of Artificial Sequence:  Hypothetical Probe Sequence
ctgtgatgcacggctttgcg

SEQ ID NO: 8278 - DNA, 20 bp, Artificial Sequence
  Description of Artificial Sequence:  Hypothetical Probe Sequence
gtgcccatttgacgaagtgc

SEQ ID NO: 8279 - DNA, 20 bp, Artificial Sequence
  Description of Artificial Sequence:  Hypothetical Probe Sequence
ccattctgatcgtcccgctt

SEQ ID NO: 8280 - DNA, 20 bp, Artificial Sequence
  Description of Artificial Sequence:  Hypothetical Probe Sequence
ccattgtctgtccagcgctt

SEQ ID NO: 8281 - DNA, 20 bp, Artificial Sequence
  Description of Artificial Sequence:  Hypothetical Probe Sequence
gtgcccattcgtacgggtct

SEQ ID NO: 8282 - DNA, 20 bp, Artificial Sequence
  Description of Artificial Sequence:  Hypothetical Probe Sequence
ccatctcaatacggacgcaa

SEQ ID NO: 8283 - DNA, 20 bp, Artificial Sequence
  Description of Artificial Sequence:  Hypothetical Probe Sequence
gtgcccataggagtgcgatg

SEQ ID NO: 8284 - DNA, 20 bp, Artificial Sequence
  Description of Artificial Sequence:  Hypothetical Probe Sequence
gtgcccatcctacacggacc

SEQ ID NO: 8285 - DNA, 20 bp, Artificial Sequence
  Description of Artificial Sequence:  Hypothetical Probe Sequence
gtgcccattgcggagtacgg

SEQ ID NO: 8286 - DNA, 20 bp, Artificial Sequence
  Description of Artificial Sequence:  Hypothetical Probe Sequence
ccatcagcctgtaccttgcg

SEQ ID NO: 8287 - DNA, 20 bp, Artificial Sequence
  Description of Artificial Sequence:  Hypothetical Probe Sequence
cgaattgagatggatgcacg

SEQ ID NO: 8288 - DNA, 20 bp, Artificial Sequence
  Description of Artificial Sequence:  Hypothetical Probe Sequence
gtgccgaatgataatccagc

SEQ ID NO: 8289 - DNA, 20 bp, Artificial Sequence
  Description of Artificial Sequence:  Hypothetical Probe Sequence
gtgccgaaaatcaatcgagt

SEQ ID NO: 8290 - DNA, 20 bp, Artificial Sequence
  Description of Artificial Sequence:  Hypothetical Probe Sequence
gtgccgaaaaagggtatccc

SEQ ID NO: 8291 - DNA, 20 bp, Artificial Sequence
  Description of Artificial Sequence:  Hypothetical Probe Sequence
cgaatgtcgatgtgattgcg

SEQ ID NO: 8292 - DNA, 20 bp, Artificial Sequence
  Description of Artificial Sequence:  Hypothetical Probe Sequence
gtgccgaacgtttgatgacc

SEQ ID NO: 8293 - DNA, 20 bp, Artificial Sequence
  Description of Artificial Sequence:  Hypothetical Probe Sequence
gtgccgaaccattcgtcagc

SEQ ID NO: 8294 - DNA, 20 bp, Artificial Sequence
  Description of Artificial Sequence:  Hypothetical Probe Sequence
gtgccgaaagtgaatcgcaa

SEQ ID NO: 8295 - DNA, 20 bp, Artificial Sequence
  Description of Artificial Sequence:  Hypothetical Probe Sequence
gtgccgaacacgcgttgagt

SEQ ID NO: 8296 - DNA, 20 bp, Artificial Sequence
  Description of Artificial Sequence:  Hypothetical Probe Sequence
cgaaggacctgtaaagcacg

SEQ ID NO: 8297 - DNA, 20 bp, Artificial Sequence
  Description of Artificial Sequence:  Hypothetical Probe Sequence
gtgccgaaacggccatcgaa

SEQ ID NO: 8298 - DNA, 20 bp, Artificial Sequence
  Description of Artificial Sequence:  Hypothetical Probe Sequence
gtgcgcttttagtcgtgtgc

SEQ ID NO: 8299 - DNA, 20 bp, Artificial Sequence
  Description of Artificial Sequence:  Hypothetical Probe Sequence
gtgcgcttaaagagtgcacg

SEQ ID NO: 8300 - DNA, 20 bp, Artificial Sequence
  Description of Artificial Sequence:  Hypothetical Probe Sequence
gtgcgctttacaaaagcacg

SEQ ID NO: 8301 - DNA, 20 bp, Artificial Sequence
  Description of Artificial Sequence:  Hypothetical Probe Sequence
gtgcgcttctcactcaggac

SEQ ID NO: 8302 - DNA, 20 bp, Artificial Sequence
  Description of Artificial Sequence:  Hypothetical Probe Sequence
gtgcgcttggtagtctacgg

SEQ ID NO: 8303 - DNA, 20 bp, Artificial Sequence
  Description of Artificial Sequence:  Hypothetical Probe Sequence
gtgcgcttaggaccatcgtt

SEQ ID NO: 8304 - DNA, 20 bp, Artificial Sequence
  Description of Artificial Sequence:  Hypothetical Probe Sequence
gtgcgcttgatgcttgggta

SEQ ID NO: 8305 - DNA, 20 bp, Artificial Sequence
  Description of Artificial Sequence:  Hypothetical Probe Sequence
gtgcgctttccccgaattga

SEQ ID NO: 8306 - DNA, 20 bp, Artificial Sequence
  Description of Artificial Sequence:  Hypothetical Probe Sequence
gtgcgcttgacctctgggta

SEQ ID NO: 8307 - DNA, 20 bp, Artificial Sequence
  Description of Artificial Sequence:  Hypothetical Probe Sequence
gtgcgcttggactgtcgatg

SEQ ID NO: 8308 - DNA, 20 bp, Artificial Sequence
  Description of Artificial Sequence:  Hypothetical Probe Sequence
gtgcggtaaaaggaccggac

SEQ ID NO: 8309 - DNA, 20 bp, Artificial Sequence
  Description of Artificial Sequence:  Hypothetical Probe Sequence
gtgcggtacgtttctggacc

SEQ ID NO: 8310 - DNA, 20 bp, Artificial Sequence
  Description of Artificial Sequence:  Hypothetical Probe Sequence
gtgcggtacgaatgcgagga

SEQ ID NO: 8311 - DNA, 20 bp, Artificial Sequence
  Description of Artificial Sequence:  Hypothetical Probe Sequence
gtgcggtagcaaaggacagc

SEQ ID NO: 8312 - DNA, 20 bp, Artificial Sequence
  Description of Artificial Sequence:  Hypothetical Probe Sequence
gtgcggtacctaacgggtgc

SEQ ID NO: 8313 - DNA, 20 bp, Artificial Sequence
  Description of Artificial Sequence:  Hypothetical Probe Sequence
gtgcggtaagccggactctg

SEQ ID NO: 8314 - DNA, 20 bp, Artificial Sequence
  Description of Artificial Sequence:  Hypothetical Probe Sequence
gtgcgtctttgacctatgcg

SEQ ID NO: 8315 - DNA, 20 bp, Artificial Sequence
  Description of Artificial Sequence:  Hypothetical Probe Sequence
gtgcgtcttgtcgcaacgaa

SEQ ID NO: 8316 - DNA, 20 bp, Artificial Sequence
  Description of Artificial Sequence:  Hypothetical Probe Sequence
gtgcgtctggtaatcggtgc

SEQ ID NO: 8317 - DNA, 20 bp, Artificial Sequence
  Description of Artificial Sequence:  Hypothetical Probe Sequence
gtgcgtctatcggcttacgg

SEQ ID NO: 8318 - DNA, 20 bp, Artificial Sequence
  Description of Artificial Sequence:  Hypothetical Probe Sequence
gtgcgtctgatgcttggtgc

SEQ ID NO: 8319 - DNA, 20 bp, Artificial Sequence
  Description of Artificial Sequence:  Hypothetical Probe Sequence
gtgcgtcttcccgtctgctt

SEQ ID NO: 8320 - DNA, 20 bp, Artificial Sequence
  Description of Artificial Sequence:  Hypothetical Probe Sequence
gtgcgagtaggagcaatgcg

SEQ ID NO: 8321 - DNA, 20 bp, Artificial Sequence
  Description of Artificial Sequence:  Hypothetical Probe Sequence
gtgcgagtgatgcagccagc

SEQ ID NO: 8322 - DNA, 20 bp, Artificial Sequence
  Description of Artificial Sequence:  Hypothetical Probe Sequence
gtgcgagttcccgtctcagc

SEQ ID NO: 8323 - DNA, 20 bp, Artificial Sequence
  Description of Artificial Sequence:  Hypothetical Probe Sequence
gtgcgagttgcgaatccgtt

SEQ ID NO: 8324 - DNA, 20 bp, Artificial Sequence
  Description of Artificial Sequence:  Hypothetical Probe Sequence
gtgcgcaattgattagagcc

SEQ ID NO: 8325 - DNA, 20 bp, Artificial Sequence
  Description of Artificial Sequence:  Hypothetical Probe Sequence
gtgcgcaaataccagcaaag

SEQ ID NO: 8326 - DNA, 20 bp, Artificial Sequence
  Description of Artificial Sequence:  Hypothetical Probe Sequence
gcaatacaagccctgttgcg

SEQ ID NO: 8327 - DNA, 20 bp, Artificial Sequence
  Description of Artificial Sequence:  Hypothetical Probe Sequence
gtgcgcaatgtctctgggac

SEQ ID NO: 8328 - DNA, 20 bp, Artificial Sequence
  Description of Artificial Sequence:  Hypothetical Probe Sequence
gtgcgcaactcaggacatcg

SEQ ID NO: 8329 - DNA, 20 bp, Artificial Sequence
  Description of Artificial Sequence:  Hypothetical Probe Sequence
gtgcgcaactgtgatggacc

SEQ ID NO: 8330 - DNA, 20 bp, Artificial Sequence
  Description of Artificial Sequence:  Hypothetical Probe Sequence
gtgcgcaaggtatacagcaa

SEQ ID NO: 8331 - DNA, 20 bp, Artificial Sequence
  Description of Artificial Sequence:  Hypothetical Probe Sequence
gtgcgcaaagtgatacagga

SEQ ID NO: 8332 - DNA, 20 bp, Artificial Sequence
  Description of Artificial Sequence:  Hypothetical Probe Sequence
gtgcgcaaaccttcgtgacc

SEQ ID NO: 8333 - DNA, 20 bp, Artificial Sequence
  Description of Artificial Sequence:  Hypothetical Probe Sequence
gtgcgcaaatcgtacacacg

SEQ ID NO: 8334 - DNA, 20 bp, Artificial Sequence
  Description of Artificial Sequence:  Hypothetical Probe Sequence
gtgcgcaagatgagtgacgg

SEQ ID NO: 8335 - DNA, 20 bp, Artificial Sequence
  Description of Artificial Sequence:  Hypothetical Probe Sequence
gtgcgcaatgcggcttggac

SEQ ID NO: 8336 - DNA, 20 bp, Artificial Sequence
  Description of Artificial Sequence:  Hypothetical Probe Sequence
gtgcgcaagtgcaggacgtt

SEQ ID NO: 8337 - DNA, 20 bp, Artificial Sequence
  Description of Artificial Sequence:  Hypothetical Probe Sequence
gtgcagtggcttacggccta

SEQ ID NO: 8338 - DNA, 20 bp, Artificial Sequence
  Description of Artificial Sequence:  Hypothetical Probe Sequence
agtggatggcaatgcgccat

SEQ ID NO: 8339 - DNA, 20 bp, Artificial Sequence
  Description of Artificial Sequence:  Hypothetical Probe Sequence
agtgtgcggctttgtctgcg

SEQ ID NO: 8340 - DNA, 20 bp, Artificial Sequence
  Description of Artificial Sequence:  Hypothetical Probe Sequence
gtgcagtgggacatcggatg

SEQ ID NO: 8341 - DNA, 20 bp, Artificial Sequence
  Description of Artificial Sequence:  Hypothetical Probe Sequence
agtgacggcagcgtctcacg

SEQ ID NO: 8342 - DNA, 20 bp, Artificial Sequence
  Description of Artificial Sequence:  Hypothetical Probe Sequence
agtgagccaatcgaccgacc

SEQ ID NO: 8343 - DNA, 20 bp, Artificial Sequence
  Description of Artificial Sequence:  Hypothetical Probe Sequence
acctgatgacgggtgcgtgc

SEQ ID NO: 8344 - DNA, 20 bp, Artificial Sequence
  Description of Artificial Sequence:  Hypothetical Probe Sequence
acctcacgcacgaatccgaa

SEQ ID NO: 8345 - DNA, 20 bp, Artificial Sequence
  Description of Artificial Sequence:  Hypothetical Probe Sequence
gtgcacctacggccatttga

SEQ ID NO: 8346 - DNA, 20 bp, Artificial Sequence
  Description of Artificial Sequence:  Hypothetical Probe Sequence
atcgtgatcagcacgggcaa

SEQ ID NO: 8347 - DNA, 20 bp, Artificial Sequence
  Description of Artificial Sequence:  Hypothetical Probe Sequence
gtgcatcgcttgctcaacgg

SEQ ID NO: 8348 - DNA, 20 bp, Artificial Sequence
  Description of Artificial Sequence:  Hypothetical Probe Sequence
atcgctgtttagagcctgcg

SEQ ID NO: 8349 - DNA, 20 bp, Artificial Sequence
  Description of Artificial Sequence:  Hypothetical Probe Sequence
gtgcatcggtctgtgcgacc

SEQ ID NO: 8350 - DNA, 20 bp, Artificial Sequence
  Description of Artificial Sequence:  Hypothetical Probe Sequence
gtgcatcgaccttgcgcacg

SEQ ID NO: 8351 - DNA, 20 bp, Artificial Sequence
  Description of Artificial Sequence:  Hypothetical Probe Sequence
atcgatcgtgatagccgacc

SEQ ID NO: 8352 - DNA, 20 bp, Artificial Sequence
  Description of Artificial Sequence:  Hypothetical Probe Sequence
gtgcatcgtccccttgtccc

SEQ ID NO: 8353 - DNA, 20 bp, Artificial Sequence
  Description of Artificial Sequence:  Hypothetical Probe Sequence
gtgcatcgcacgcacggctt

SEQ ID NO: 8354 - DNA, 20 bp, Artificial Sequence
  Description of Artificial Sequence:  Hypothetical Probe Sequence
gtgcatcgcagccgtttcgt

SEQ ID NO: 8355 - DNA, 20 bp, Artificial Sequence
  Description of Artificial Sequence:  Hypothetical Probe Sequence
gtgcatcgacgggcaatgat

SEQ ID NO: 8356 - DNA, 20 bp, Artificial Sequence
  Description of Artificial Sequence:  Hypothetical Probe Sequence
aggatcgttgtctcccgcaa

SEQ ID NO: 8357 - DNA, 20 bp, Artificial Sequence
  Description of Artificial Sequence:  Hypothetical Probe Sequence
aggacttgcgaaatcgagcc

SEQ ID NO: 8358 - DNA, 20 bp, Artificial Sequence
  Description of Artificial Sequence:  Hypothetical Probe Sequence
gtgcaggagcttgcttcgtt

SEQ ID NO: 8359 - DNA, 20 bp, Artificial Sequence
  Description of Artificial Sequence:  Hypothetical Probe Sequence
aggaaggaaatcgacccgaa

SEQ ID NO: 8360 - DNA, 20 bp, Artificial Sequence
  Description of Artificial Sequence:  Hypothetical Probe Sequence
gtgcaggacacgtgtcgcaa

SEQ ID NO: 8361 - DNA, 20 bp, Artificial Sequence
  Description of Artificial Sequence:  Hypothetical Probe Sequence
gtgcaggacagccgaacgaa

SEQ ID NO: 8362 - DNA, 20 bp, Artificial Sequence
  Description of Artificial Sequence:  Hypothetical Probe Sequence
aggagacccgaagaccacgg

SEQ ID NO: 8363 - DNA, 20 bp, Artificial Sequence
  Description of Artificial Sequence:  Hypothetical Probe Sequence
gtgcaggagtgccgttagcc

SEQ ID NO: 8364 - DNA, 20 bp, Artificial Sequence
  Description of Artificial Sequence:  Hypothetical Probe Sequence
gtgcaggaacggctgtcgtt

SEQ ID NO: 8365 - DNA, 20 bp, Artificial Sequence
  Description of Artificial Sequence:  Hypothetical Probe Sequence
gtgccctaaaaggacctccc

SEQ ID NO: 8366 - DNA, 20 bp, Artificial Sequence
  Description of Artificial Sequence:  Hypothetical Probe Sequence
cctatgtccgaaatcgcacg

SEQ ID NO: 8367 - DNA, 20 bp, Artificial Sequence
  Description of Artificial Sequence:  Hypothetical Probe Sequence
cctacgttggtagctttgcg

SEQ ID NO: 8368 - DNA, 20 bp, Artificial Sequence
  Description of Artificial Sequence:  Hypothetical Probe Sequence
cctaccattctgcacgcgaa

SEQ ID NO: 8369 - DNA, 20 bp, Artificial Sequence
  Description of Artificial Sequence:  Hypothetical Probe Sequence
gtgccctagacctgtcgcaa

SEQ ID NO: 8370 - DNA, 20 bp, Artificial Sequence
  Description of Artificial Sequence:  Hypothetical Probe Sequence
gtgccctaagcctcgtctgt

SEQ ID NO: 8371 - DNA, 20 bp, Artificial Sequence
  Description of Artificial Sequence:  Hypothetical Probe Sequence
gtgcgatgtgatatcgcgaa

SEQ ID NO: 8372 - DNA, 20 bp, Artificial Sequence
  Description of Artificial Sequence:  Hypothetical Probe Sequence
gtgcgatgtctgtgcgagcc

SEQ ID NO: 8373 - DNA, 20 bp, Artificial Sequence
  Description of Artificial Sequence:  Hypothetical Probe Sequence
gtgcgatgcttggcaattag

SEQ ID NO: 8374 - DNA, 20 bp, Artificial Sequence
  Description of Artificial Sequence:  Hypothetical Probe Sequence
gtgcgatgatcgctgtgtgc

SEQ ID NO: 8375 - DNA, 20 bp, Artificial Sequence
  Description of Artificial Sequence:  Hypothetical Probe Sequence
gtgcgatgtcccggacgcaa

SEQ ID NO: 8376 - DNA, 20 bp, Artificial Sequence
  Description of Artificial Sequence:  Hypothetical Probe Sequence
tcccttagcttggtgctgcg

SEQ ID NO: 8377 - DNA, 20 bp, Artificial Sequence
  Description of Artificial Sequence:  Hypothetical Probe Sequence
tccccttggagttgattgcg

SEQ ID NO: 8378 - DNA, 20 bp, Artificial Sequence
  Description of Artificial Sequence:  Hypothetical Probe Sequence
tccccgttctgtctgttgcg

SEQ ID NO: 8379 - DNA, 20 bp, Artificial Sequence
  Description of Artificial Sequence:  Hypothetical Probe Sequence
tcccgagttacagtgccacg

SEQ ID NO: 8380 - DNA, 20 bp, Artificial Sequence
  Description of Artificial Sequence:  Hypothetical Probe Sequence
tcccacctgacccctatccc

SEQ ID NO: 8381 - DNA, 20 bp, Artificial Sequence
  Description of Artificial Sequence:  Hypothetical Probe Sequence
gtgctcccatcgatcgcgtt

SEQ ID NO: 8382 - DNA, 20 bp, Artificial Sequence
  Description of Artificial Sequence:  Hypothetical Probe Sequence
tcccgtgcagtgtcccggta

SEQ ID NO: 8383 - DNA, 20 bp, Artificial Sequence
  Description of Artificial Sequence:  Hypothetical Probe Sequence
gtgctcccggacttgagtgc

SEQ ID NO: 8384 - DNA, 20 bp, Artificial Sequence
  Description of Artificial Sequence:  Hypothetical Probe Sequence
tcccagccgtcttctgcacg

SEQ ID NO: 8385 - DNA, 20 bp, Artificial Sequence
  Description of Artificial Sequence:  Hypothetical Probe Sequence
gtgctgcgtctgtctgcacg

SEQ ID NO: 8386 - DNA, 20 bp, Artificial Sequence
  Description of Artificial Sequence:  Hypothetical Probe Sequence
gtgctgcgctgtgcaaaatc

SEQ ID NO: 8387 - DNA, 20 bp, Artificial Sequence
  Description of Artificial Sequence:  Hypothetical Probe Sequence
tgcggagtaaagagccccta

SEQ ID NO: 8388 - DNA, 20 bp, Artificial Sequence
  Description of Artificial Sequence:  Hypothetical Probe Sequence
tgcgtccctacacagctccc

SEQ ID NO: 8389 - DNA, 20 bp, Artificial Sequence
  Description of Artificial Sequence:  Hypothetical Probe Sequence
tgcgcacggcttgtctgtgc

SEQ ID NO: 8390 - DNA, 20 bp, Artificial Sequence
  Description of Artificial Sequence:  Hypothetical Probe Sequence
gtgctgcgcagcaaagcacg

SEQ ID NO: 8391 - DNA, 20 bp, Artificial Sequence
  Description of Artificial Sequence:  Hypothetical Probe Sequence
tgcggacctctgagtgtgcg

SEQ ID NO: 8392 - DNA, 20 bp, Artificial Sequence
  Description of Artificial Sequence:  Hypothetical Probe Sequence
tgcgagccgcaagatgcttg

SEQ ID NO: 8393 - DNA, 20 bp, Artificial Sequence
  Description of Artificial Sequence:  Hypothetical Probe Sequence
gtgccacgttaggtgcgtgc

SEQ ID NO: 8394 - DNA, 20 bp, Artificial Sequence
  Description of Artificial Sequence:  Hypothetical Probe Sequence
gtgccacgtctgagtggacc

SEQ ID NO: 8395 - DNA, 20 bp, Artificial Sequence
  Description of Artificial Sequence:  Hypothetical Probe Sequence
gtgccacgggtaacctagga

SEQ ID NO: 8396 - DNA, 20 bp, Artificial Sequence
  Description of Artificial Sequence:  Hypothetical Probe Sequence
gtgccacggagtacgggagt

SEQ ID NO: 8397 - DNA, 20 bp, Artificial Sequence
  Description of Artificial Sequence:  Hypothetical Probe Sequence
gtgccacgagtgtgtcatcg

SEQ ID NO: 8398 - DNA, 20 bp, Artificial Sequence
  Description of Artificial Sequence:  Hypothetical Probe Sequence
gtgccacgagccaatcctca

SEQ ID NO: 8399 - DNA, 20 bp, Artificial Sequence
  Description of Artificial Sequence:  Hypothetical Probe Sequence
gtgccagctgatagccaaag

SEQ ID NO: 8400 - DNA, 20 bp, Artificial Sequence
  Description of Artificial Sequence:  Hypothetical Probe Sequence
gtgccagcaatcaaagggta

SEQ ID NO: 8401 - DNA, 20 bp, Artificial Sequence
  Description of Artificial Sequence:  Hypothetical Probe Sequence
gtgccagcataccagcgatg

SEQ ID NO: 8402 - DNA, 20 bp, Artificial Sequence
  Description of Artificial Sequence:  Hypothetical Probe Sequence
gtgccagcaaaggtctgtgc

SEQ ID NO: 8403 - DNA, 20 bp, Artificial Sequence
  Description of Artificial Sequence:  Hypothetical Probe Sequence
gtgccagccgaattagtgcg

SEQ ID NO: 8404 - DNA, 20 bp, Artificial Sequence
  Description of Artificial Sequence:  Hypothetical Probe Sequence
gtgccagcgtcttgtcgtgc

SEQ ID NO: 8405 - DNA, 20 bp, Artificial Sequence
  Description of Artificial Sequence:  Hypothetical Probe Sequence
cagcgagtttaggtgcagcc

SEQ ID NO: 8406 - DNA, 20 bp, Artificial Sequence
  Description of Artificial Sequence:  Hypothetical Probe Sequence
gtgccagccctaaatcggac

SEQ ID NO: 8407 - DNA, 20 bp, Artificial Sequence
  Description of Artificial Sequence:  Hypothetical Probe Sequence
gtgccagctcccctcacttg

SEQ ID NO: 8408 - DNA, 20 bp, Artificial Sequence
  Description of Artificial Sequence:  Hypothetical Probe Sequence
gtgccagcgtgcagtggcaa

SEQ ID NO: 8409 - DNA, 20 bp, Artificial Sequence
  Description of Artificial Sequence:  Hypothetical Probe Sequence
gtgccagcacggaaagatcg

SEQ ID NO: 8410 - DNA, 20 bp, Artificial Sequence
  Description of Artificial Sequence:  Hypothetical Probe Sequence
gtgcgaccttaggtgcggta

SEQ ID NO: 8411 - DNA, 20 bp, Artificial Sequence
  Description of Artificial Sequence:  Hypothetical Probe Sequence
gtgcgaccatacagccggac

SEQ ID NO: 8412 - DNA, 20 bp, Artificial Sequence
  Description of Artificial Sequence:  Hypothetical Probe Sequence
gtgcgaccctgtttagcagc

SEQ ID NO: 8413 - DNA, 20 bp, Artificial Sequence
  Description of Artificial Sequence:  Hypothetical Probe Sequence
gtgcgacccgaaagcctgtc

SEQ ID NO: 8414 - DNA, 20 bp, Artificial Sequence
  Description of Artificial Sequence:  Hypothetical Probe Sequence
gtgcgaccgcttataccagc

SEQ ID NO: 8415 - DNA, 20 bp, Artificial Sequence
  Description of Artificial Sequence:  Hypothetical Probe Sequence
gtgcgaccggtaggacggta

SEQ ID NO: 8416 - DNA, 20 bp, Artificial Sequence
  Description of Artificial Sequence:  Hypothetical Probe Sequence
gtgcgaccagtggatgcacg

SEQ ID NO: 8417 - DNA, 20 bp, Artificial Sequence
  Description of Artificial Sequence:  Hypothetical Probe Sequence
gtgcgaccaggaagccacct

SEQ ID NO: 8418 - DNA, 20 bp, Artificial Sequence
  Description of Artificial Sequence:  Hypothetical Probe Sequence
gtgcgacccagcgagtagcc

SEQ ID NO: 8419 - DNA, 20 bp, Artificial Sequence
  Description of Artificial Sequence:  Hypothetical Probe Sequence
gtgcgaccacggctcaatcg

SEQ ID NO: 8420 - DNA, 20 bp, Artificial Sequence
  Description of Artificial Sequence:  Hypothetical Probe Sequence
gtgcgtgcttgacgaaggac

SEQ ID NO: 8421 - DNA, 20 bp, Artificial Sequence
  Description of Artificial Sequence:  Hypothetical Probe Sequence
gtgcgtgctgattcccaaag

SEQ ID NO: 8422 - DNA, 20 bp, Artificial Sequence
  Description of Artificial Sequence:  Hypothetical Probe Sequence
gtgcgtgctacatgcgagga

SEQ ID NO: 8423 - DNA, 20 bp, Artificial Sequence
  Description of Artificial Sequence:  Hypothetical Probe Sequence
gtgcgtgcctgtacctgacc

SEQ ID NO: 8424 - DNA, 20 bp, Artificial Sequence
  Description of Artificial Sequence:  Hypothetical Probe Sequence
gtgcgtgcgtctccatgcaa

SEQ ID NO: 8425 - DNA, 20 bp, Artificial Sequence
  Description of Artificial Sequence:  Hypothetical Probe Sequence
gtgcgtgcgagtctgtgtgc

SEQ ID NO: 8426 - DNA, 20 bp, Artificial Sequence
  Description of Artificial Sequence:  Hypothetical Probe Sequence
gtgcgtgcatcgccatagcc

SEQ ID NO: 8427 - DNA, 20 bp, Artificial Sequence
  Description of Artificial Sequence:  Hypothetical Probe Sequence
gtgcgtgccacggcttcacg

SEQ ID NO: 8428 - DNA, 20 bp, Artificial Sequence
  Description of Artificial Sequence:  Hypothetical Probe Sequence
gtgcggacatacgcaaagcc

SEQ ID NO: 8429 - DNA, 20 bp, Artificial Sequence
  Description of Artificial Sequence:  Hypothetical Probe Sequence
gtgcggacgtctcgttggta

SEQ ID NO: 8430 - DNA, 20 bp, Artificial Sequence
  Description of Artificial Sequence:  Hypothetical Probe Sequence
gtgcggactccccagcgtct

SEQ ID NO: 8431 - DNA, 20 bp, Artificial Sequence
  Description of Artificial Sequence:  Hypothetical Probe Sequence
ggactgcgagtgtgtcgcaa

SEQ ID NO: 8432 - DNA, 20 bp, Artificial Sequence
  Description of Artificial Sequence:  Hypothetical Probe Sequence
gtgcggacgacctcgtttga

SEQ ID NO: 8433 - DNA, 20 bp, Artificial Sequence
  Description of Artificial Sequence:  Hypothetical Probe Sequence
gtgcacggaatcgctttgcg

SEQ ID NO: 8434 - DNA, 20 bp, Artificial Sequence
  Description of Artificial Sequence:  Hypothetical Probe Sequence
acggtctgtccccacgccat

SEQ ID NO: 8435 - DNA, 20 bp, Artificial Sequence
  Description of Artificial Sequence:  Hypothetical Probe Sequence
acggctcaaccttctgcagc

SEQ ID NO: 8436 - DNA, 20 bp, Artificial Sequence
  Description of Artificial Sequence:  Hypothetical Probe Sequence
gtgcacggccatcttgacct

SEQ ID NO: 8437 - DNA, 20 bp, Artificial Sequence
  Description of Artificial Sequence:  Hypothetical Probe Sequence
gtgcacgggtcttgcgatcg

SEQ ID NO: 8438 - DNA, 20 bp, Artificial Sequence
  Description of Artificial Sequence:  Hypothetical Probe Sequence
gtgcacgggagtccatcgaa

SEQ ID NO: 8439 - DNA, 20 bp, Artificial Sequence
  Description of Artificial Sequence:  Hypothetical Probe Sequence
acggagtggaccagccggac

SEQ ID NO: 8440 - DNA, 20 bp, Artificial Sequence
  Description of Artificial Sequence:  Hypothetical Probe Sequence
gtgcacggatcggatgagcc

SEQ ID NO: 8441 - DNA, 20 bp, Artificial Sequence
  Description of Artificial Sequence:  Hypothetical Probe Sequence
gtgcacggaggatccctgtc

SEQ ID NO: 8442 - DNA, 20 bp, Artificial Sequence
  Description of Artificial Sequence:  Hypothetical Probe Sequence
gtgcacgggtgcgagtgtgc

SEQ ID NO: 8443 - DNA, 20 bp, Artificial Sequence
  Description of Artificial Sequence:  Hypothetical Probe Sequence
gtgcacggggacccattctg

SEQ ID NO: 8444 - DNA, 20 bp, Artificial Sequence
  Description of Artificial Sequence:  Hypothetical Probe Sequence
gtgcacggacggagtggtgc

SEQ ID NO: 8445 - DNA, 20 bp, Artificial Sequence
  Description of Artificial Sequence:  Hypothetical Probe Sequence
gtgcagccaaagcagccgtt

SEQ ID NO: 8446 - DNA, 20 bp, Artificial Sequence
  Description of Artificial Sequence:  Hypothetical Probe Sequence
gtgcagcctcgttacaacgg

SEQ ID NO: 8447 - DNA, 20 bp, Artificial Sequence
  Description of Artificial Sequence:  Hypothetical Probe Sequence
gtgcagccatcgaatcgcaa

SEQ ID NO: 8448 - DNA, 20 bp, Artificial Sequence
  Description of Artificial Sequence:  Hypothetical Probe Sequence
gtgcagcctcccgaccacct

SEQ ID NO: 8449 - DNA, 20 bp, Artificial Sequence
  Description of Artificial Sequence:  Hypothetical Probe Sequence
gtgcagcctgcgccatcttg

SEQ ID NO: 8450 - DNA, 20 bp, Artificial Sequence
  Description of Artificial Sequence:  Hypothetical Probe Sequence
gtgcagccgaccccatgtgc

SEQ ID NO: 8451 - DNA, 20 bp, Artificial Sequence
  Description of Artificial Sequence:  Hypothetical Probe Sequence
gtgcagccgtgcagtgcgaa

SEQ ID NO: 8452 - DNA, 20 bp, Artificial Sequence
  Description of Artificial Sequence:  Hypothetical Probe Sequence
gtgcagccacgggatgctgt

SEQ ID NO: 8453 - DNA, 20 bp, Artificial Sequence
  Description of Artificial Sequence:  Hypothetical Probe Sequence
ttgaagccaatcccattgcg

SEQ ID NO: 8454 - DNA, 20 bp, Artificial Sequence
  Description of Artificial Sequence:  Hypothetical Probe Sequence
ttagcagccacgcacgtgcg

SEQ ID NO: 8455 - DNA, 20 bp, Artificial Sequence
  Description of Artificial Sequence:  Hypothetical Probe Sequence
aatccttgacggccatcagc

SEQ ID NO: 8456 - DNA, 20 bp, Artificial Sequence
  Description of Artificial Sequence:  Hypothetical Probe Sequence
aatctgcgtacaagcccgtt

SEQ ID NO: 8457 - DNA, 20 bp, Artificial Sequence
  Description of Artificial Sequence:  Hypothetical Probe Sequence
aaaggatgacgggcaatgcg

SEQ ID NO: 8458 - DNA, 20 bp, Artificial Sequence
  Description of Artificial Sequence:  Hypothetical Probe Sequence
ggacaaagcacgagccttga

SEQ ID NO: 8459 - DNA, 20 bp, Artificial Sequence
  Description of Artificial Sequence:  Hypothetical Probe Sequence
tctgcgtttcgttcgtgtgc

SEQ ID NO: 8460 - DNA, 20 bp, Artificial Sequence
  Description of Artificial Sequence:  Hypothetical Probe Sequence
tctgcctaacgggctttgcg

SEQ ID NO: 8461 - DNA, 20 bp, Artificial Sequence
  Description of Artificial Sequence:  Hypothetical Probe Sequence
tctgcacggcaaacctgctt

SEQ ID NO: 8462 - DNA, 20 bp, Artificial Sequence
  Description of Artificial Sequence:  Hypothetical Probe Sequence
tcgtcgttatcgcagcagga

SEQ ID NO: 8463 - DNA, 20 bp, Artificial Sequence
  Description of Artificial Sequence:  Hypothetical Probe Sequence
tcgtccatgatgggactgcg

SEQ ID NO: 8464 - DNA, 20 bp, Artificial Sequence
  Description of Artificial Sequence:  Hypothetical Probe Sequence
tcgtacggcttggtcttgcg

SEQ ID NO: 8465 - DNA, 20 bp, Artificial Sequence
  Description of Artificial Sequence:  Hypothetical Probe Sequence
cttgcttgtgcgttagcacg

SEQ ID NO: 8466 - DNA, 20 bp, Artificial Sequence
  Description of Artificial Sequence:  Hypothetical Probe Sequence
ggaccttgcgttacggccta

SEQ ID NO: 8467 - DNA, 20 bp, Artificial Sequence
  Description of Artificial Sequence:  Hypothetical Probe Sequence
cttgctcaaaagcagcagcc

SEQ ID NO: 8468 - DNA, 20 bp, Artificial Sequence
  Description of Artificial Sequence:  Hypothetical Probe Sequence
ggaccttggagtcacgagcc

SEQ ID NO: 8469 - DNA, 20 bp, Artificial Sequence
  Description of Artificial Sequence:  Hypothetical Probe Sequence
ggaccttggcaaggacgcaa

SEQ ID NO: 8470 - DNA, 20 bp, Artificial Sequence
  Description of Artificial Sequence:  Hypothetical Probe Sequence
ggaccttgcagcgcttgcaa

SEQ ID NO: 8471 - DNA, 20 bp, Artificial Sequence
  Description of Artificial Sequence:  Hypothetical Probe Sequence
ggaccttggtgccgaatcgt

SEQ ID NO: 8472 - DNA, 20 bp, Artificial Sequence
  Description of Artificial Sequence:  Hypothetical Probe Sequence
ggaccttgggacgcaacgaa

SEQ ID NO: 8473 - DNA, 20 bp, Artificial Sequence
  Description of Artificial Sequence:  Hypothetical Probe Sequence
cgttcgttatacacgggcaa

SEQ ID NO: 8474 - DNA, 20 bp, Artificial Sequence
  Description of Artificial Sequence:  Hypothetical Probe Sequence
ggaccgttacctgagttgcg

SEQ ID NO: 8475 - DNA, 20 bp, Artificial Sequence
  Description of Artificial Sequence:  Hypothetical Probe Sequence
ggaccgtttgcggagtatcg

SEQ ID NO: 8476 - DNA, 20 bp, Artificial Sequence
  Description of Artificial Sequence:  Hypothetical Probe Sequence
ggacctgtttgatgcggagt

SEQ ID NO: 8477 - DNA, 20 bp, Artificial Sequence
  Description of Artificial Sequence:  Hypothetical Probe Sequence
ggacctgtccatccattccc

SEQ ID NO: 8478 - DNA, 20 bp, Artificial Sequence
  Description of Artificial Sequence:  Hypothetical Probe Sequence
ccattgatcagcgaccccat

SEQ ID NO: 8479 - DNA, 20 bp, Artificial Sequence
  Description of Artificial Sequence:  Hypothetical Probe Sequence
ccataaagctgttcccgtgc

SEQ ID NO: 8480 - DNA, 20 bp, Artificial Sequence
  Description of Artificial Sequence:  Hypothetical Probe Sequence
ggacccatcttgcttgtccc

SEQ ID NO: 8481 - DNA, 20 bp, Artificial Sequence
  Description of Artificial Sequence:  Hypothetical Probe Sequence
ggacccatggtatgcggtgc

SEQ ID NO: 8482 - DNA, 20 bp, Artificial Sequence
  Description of Artificial Sequence:  Hypothetical Probe Sequence
ggacccatcacgcttgcgaa

SEQ ID NO: 8483 - DNA, 20 bp, Artificial Sequence
  Description of Artificial Sequence:  Hypothetical Probe Sequence
ggacccatgtgcatacgcaa

SEQ ID NO: 8484 - DNA, 20 bp, Artificial Sequence
  Description of Artificial Sequence:  Hypothetical Probe Sequence
cgaattgacttgcacgcacg

SEQ ID NO: 8485 - DNA, 20 bp, Artificial Sequence
  Description of Artificial Sequence:  Hypothetical Probe Sequence
ggaccgaaatacacgggtgc

SEQ ID NO: 8486 - DNA, 20 bp, Artificial Sequence
  Description of Artificial Sequence:  Hypothetical Probe Sequence
cgaaaaagtctgcttggcaa

SEQ ID NO: 8487 - DNA, 20 bp, Artificial Sequence
  Description of Artificial Sequence:  Hypothetical Probe Sequence
ggaccgaacttgacggtccc

SEQ ID NO: 8488 - DNA, 20 bp, Artificial Sequence
  Description of Artificial Sequence:  Hypothetical Probe Sequence
ggaccgaagctttcgtagga

SEQ ID NO: 8489 - DNA, 20 bp, Artificial Sequence
  Description of Artificial Sequence:  Hypothetical Probe Sequence
ggaccgaaacctgcttgctt

SEQ ID NO: 8490 - DNA, 20 bp, Artificial Sequence
  Description of Artificial Sequence:  Hypothetical Probe Sequence
cgaaaggaataccagccacg

SEQ ID NO: 8491 - DNA, 20 bp, Artificial Sequence
  Description of Artificial Sequence:  Hypothetical Probe Sequence
ggaccgaagacccagcgcaa

SEQ ID NO: 8492 - DNA, 20 bp, Artificial Sequence
  Description of Artificial Sequence:  Hypothetical Probe Sequence
ggacgcttttagggaccgaa

SEQ ID NO: 8493 - DNA, 20 bp, Artificial Sequence
  Description of Artificial Sequence:  Hypothetical Probe Sequence
ggacgcttaaaggtgcgtgc

SEQ ID NO: 8494 - DNA, 20 bp, Artificial Sequence
  Description of Artificial Sequence:  Hypothetical Probe Sequence
gctttgtcaccttccctgcg

SEQ ID NO: 8495 - DNA, 20 bp, Artificial Sequence
  Description of Artificial Sequence:  Hypothetical Probe Sequence
ggacgcttggtaaatcgctt

SEQ ID NO: 8496 - DNA, 20 bp, Artificial Sequence
  Description of Artificial Sequence:  Hypothetical Probe Sequence
ggacgcttacctgcaacgaa

SEQ ID NO: 8497 - DNA, 20 bp, Artificial Sequence
  Description of Artificial Sequence:  Hypothetical Probe Sequence
gcttcctatgtcatcggcaa

SEQ ID NO: 8498 - DNA, 20 bp, Artificial Sequence
  Description of Artificial Sequence:  Hypothetical Probe Sequence
ggacgctttgcgttgaatcg

SEQ ID NO: 8499 - DNA, 20 bp, Artificial Sequence
  Description of Artificial Sequence:  Hypothetical Probe Sequence
ggacggtacgtttcgttgcg

SEQ ID NO: 8500 - DNA, 20 bp, Artificial Sequence
  Description of Artificial Sequence:  Hypothetical Probe Sequence3> Abramites sp.
ggacggtaccattgtcgcaa

SEQ ID NO: 8501 - DNA, 20 bp, Artificial Sequence
  Description of Artificial Sequence:  Hypothetical Probe Sequence
ggacggtagtgcagtgcagc

SEQ ID NO: 8502 - DNA, 20 bp, Artificial Sequence
  Description of Artificial Sequence:  Hypothetical Probe Sequence
ggacggtaggacgcaatccc

SEQ ID NO: 8503 - DNA, 20 bp, Artificial Sequence
  Description of Artificial Sequence:  Hypothetical Probe Sequence
ggacggtaagccgtgcacct

SEQ ID NO: 8504 - DNA, 20 bp, Artificial Sequence
  Description of Artificial Sequence:  Hypothetical Probe Sequence
gtctttgatccccacgcgaa

SEQ ID NO: 8505 - DNA, 20 bp, Artificial Sequence
  Description of Artificial Sequence:  Hypothetical Probe Sequence
ggacgtcttcgtgcaagcaa

SEQ ID NO: 8506 - DNA, 20 bp, Artificial Sequence
  Description of Artificial Sequence:  Hypothetical Probe Sequence
ggacgtctccatggaccagc

SEQ ID NO: 8507 - DNA, 20 bp, Artificial Sequence
  Description of Artificial Sequence:  Hypothetical Probe Sequence
gtctgcaagacctctgtgcg

SEQ ID NO: 8508 - DNA, 20 bp, Artificial Sequence
  Description of Artificial Sequence:  Hypothetical Probe Sequence
gtctcacgcacgaaagcagc

SEQ ID NO: 8509 - DNA, 20 bp, Artificial Sequence
  Description of Artificial Sequence:  Hypothetical Probe Sequence
gagtatcgggaccctatgcg

SEQ ID NO: 8510 - DNA, 20 bp, Artificial Sequence
  Description of Artificial Sequence:  Hypothetical Probe Sequence
ggacgagtcagcgtgcgtgc

SEQ ID NO: 8511 - DNA, 20 bp, Artificial Sequence
  Description of Artificial Sequence:  Hypothetical Probe Sequence
ggacgagtacggttgaatcg

SEQ ID NO: 8512 - DNA, 20 bp, Artificial Sequence
  Description of Artificial Sequence:  Hypothetical Probe Sequence
gcaattgaacggagtgcagc

SEQ ID NO: 8513 - DNA, 20 bp, Artificial Sequence
  Description of Artificial Sequence:  Hypothetical Probe Sequence
ggacgcaaatacgtgcccat

SEQ ID NO: 8514 - DNA, 20 bp, Artificial Sequence
  Description of Artificial Sequence:  Hypothetical Probe Sequence
ggacgcaatgtcccatggta

SEQ ID NO: 8515 - DNA, 20 bp, Artificial Sequence
  Description of Artificial Sequence:  Hypothetical Probe Sequence
ggacgcaatcgttctggtgc

SEQ ID NO: 8516 - DNA, 20 bp, Artificial Sequence
  Description of Artificial Sequence:  Hypothetical Probe Sequence
gcaacctaatactgcgtgcg

SEQ ID NO: 8517 - DNA, 20 bp, Artificial Sequence
  Description of Artificial Sequence:  Hypothetical Probe Sequence
ggacgcaatgcgttgaagga

SEQ ID NO: 8518 - DNA, 20 bp, Artificial Sequence
  Description of Artificial Sequence:  Hypothetical Probe Sequence
ggacgcaagtgcagtggtct

SEQ ID NO: 8519 - DNA, 20 bp, Artificial Sequence
  Description of Artificial Sequence:  Hypothetical Probe Sequence
ggacgcaaggactcccggta

SEQ ID NO: 8520 - DNA, 20 bp, Artificial Sequence
  Description of Artificial Sequence:  Hypothetical Probe Sequence
ggacgcaaacggtgatcagc

SEQ ID NO: 8521 - DNA, 20 bp, Artificial Sequence
  Description of Artificial Sequence:  Hypothetical Probe Sequence
agtgtgcgacggacctgtgc

SEQ ID NO: 8522 - DNA, 20 bp, Artificial Sequence
  Description of Artificial Sequence:  Hypothetical Probe Sequence
acctcacgggactgattgcg

SEQ ID NO: 8523 - DNA, 20 bp, Artificial Sequence
  Description of Artificial Sequence:  Hypothetical Probe Sequence
ggacacctgaccgtgcacgg

SEQ ID NO: 8524 - DNA, 20 bp, Artificial Sequence
  Description of Artificial Sequence:  Hypothetical Probe Sequence
acctagccttagcgtttgcg

SEQ ID NO: 8525 - DNA, 20 bp, Artificial Sequence
  Description of Artificial Sequence:  Hypothetical Probe Sequence
atcgaaagacgggtgccacg

SEQ ID NO: 8526 - DNA, 20 bp, Artificial Sequence
  Description of Artificial Sequence:  Hypothetical Probe Sequence
atcggcttcttgcttgacgg

SEQ ID NO: 8527 - DNA, 20 bp, Artificial Sequence
  Description of Artificial Sequence:  Hypothetical Probe Sequence
atcgcacggtctagccatcg

SEQ ID NO: 8528 - DNA, 20 bp, Artificial Sequence
  Description of Artificial Sequence:  Hypothetical Probe Sequence
ggacatcgacggggacctgt

SEQ ID NO: 8529 - DNA, 20 bp, Artificial Sequence
  Description of Artificial Sequence:  Hypothetical Probe Sequence
aggacgaaatcgtcccggac

SEQ ID NO: 8530 - DNA, 20 bp, Artificial Sequence
  Description of Artificial Sequence:  Hypothetical Probe Sequence
ggacaggaatcgacggccta

SEQ ID NO: 8531 - DNA, 20 bp, Artificial Sequence
  Description of Artificial Sequence:  Hypothetical Probe Sequence
aggaaggattgaggacgtgc

SEQ ID NO: 8532 - DNA, 20 bp, Artificial Sequence
  Description of Artificial Sequence:  Hypothetical Probe Sequence
cctacgaaaggatcgttgcg

SEQ ID NO: 8533 - DNA, 20 bp, Artificial Sequence
  Description of Artificial Sequence:  Hypothetical Probe Sequence
ggaccctagcttgcaagtgc

SEQ ID NO: 8534 - DNA, 20 bp, Artificial Sequence
  Description of Artificial Sequence:  Hypothetical Probe Sequence
cctagcaacagcgatgcgaa

SEQ ID NO: 8535 - DNA, 20 bp, Artificial Sequence
  Description of Artificial Sequence:  Hypothetical Probe Sequence
cctacctagaccagccacgg

SEQ ID NO: 8536 - DNA, 20 bp, Artificial Sequence
  Description of Artificial Sequence:  Hypothetical Probe Sequence
ggacgatgctcactgttgcg

SEQ ID NO: 8537 - DNA, 20 bp, Artificial Sequence
  Description of Artificial Sequence:  Hypothetical Probe Sequence
ggacgatgggtaacggggta

SEQ ID NO: 8538 - DNA, 20 bp, Artificial Sequence
  Description of Artificial Sequence:  Hypothetical Probe Sequence
ggacgatggtctagcccgaa

SEQ ID NO: 8539 - DNA, 20 bp, Artificial Sequence
  Description of Artificial Sequence:  Hypothetical Probe Sequence
ggacgatgatcgcgaaagcc

SEQ ID NO: 8540 - DNA, 20 bp, Artificial Sequence
  Description of Artificial Sequence:  Hypothetical Probe Sequence
tccctgtccgttgcttgcaa

SEQ ID NO: 8541 - DNA, 20 bp, Artificial Sequence
  Description of Artificial Sequence:  Hypothetical Probe Sequence
tcccctgttacagacctgcg

SEQ ID NO: 8542 - DNA, 20 bp, Artificial Sequence
  Description of Artificial Sequence:  Hypothetical Probe Sequence
tcccccatttagcacggatg

SEQ ID NO: 8543 - DNA, 20 bp, Artificial Sequence
  Description of Artificial Sequence:  Hypothetical Probe Sequence
ggactcccacctagcccagc

SEQ ID NO: 8544 - DNA, 20 bp, Artificial Sequence
  Description of Artificial Sequence:  Hypothetical Probe Sequence
ggactcccatcgcgaaagga

SEQ ID NO: 8545 - DNA, 20 bp, Artificial Sequence
  Description of Artificial Sequence:  Hypothetical Probe Sequence
ggactccccacgcttgcgtt

SEQ ID NO: 8546 - DNA, 20 bp, Artificial Sequence
  Description of Artificial Sequence:  Hypothetical Probe Sequence
ggactcccggacgcttcacg

SEQ ID NO: 8547 - DNA, 20 bp, Artificial Sequence
  Description of Artificial Sequence:  Hypothetical Probe Sequence
tgcgttagccatcacgacgg

SEQ ID NO: 8548 - DNA, 20 bp, Artificial Sequence
  Description of Artificial Sequence:  Hypothetical Probe Sequence
ggactgcgtcgtcgttcagc

SEQ ID NO: 8549 - DNA, 20 bp, Artificial Sequence
  Description of Artificial Sequence:  Hypothetical Probe Sequence
ggactgcgcttgacctcacg

SEQ ID NO: 8550 - DNA, 20 bp, Artificial Sequence
  Description of Artificial Sequence:  Hypothetical Probe Sequence
tgcgctcatcgtcgttttga

SEQ ID NO: 8551 - DNA, 20 bp, Artificial Sequence
  Description of Artificial Sequence:  Hypothetical Probe Sequence
tgcggcttaggagcttcacg

SEQ ID NO: 8552 - DNA, 20 bp, Artificial Sequence
  Description of Artificial Sequence:  Hypothetical Probe Sequence
tgcgacctttgagcaacgaa

SEQ ID NO: 8553 - DNA, 20 bp, Artificial Sequence
  Description of Artificial Sequence:  Hypothetical Probe Sequence
tgcgatcgacctccatggac

SEQ ID NO: 8554 - DNA, 20 bp, Artificial Sequence
  Description of Artificial Sequence:  Hypothetical Probe Sequence
tgcggatggagtatcgccat

SEQ ID NO: 8555 - DNA, 20 bp, Artificial Sequence
  Description of Artificial Sequence:  Hypothetical Probe Sequence
tgcgcacgataccagcagga

SEQ ID NO: 8556 - DNA, 20 bp, Artificial Sequence
  Description of Artificial Sequence:  Hypothetical Probe Sequence
ggactgcgggacccatccat

SEQ ID NO: 8557 - DNA, 20 bp, Artificial Sequence
  Description of Artificial Sequence:  Hypothetical Probe Sequence
cacgtgatgacctccccgaa

SEQ ID NO: 8558 - DNA, 20 bp, Artificial Sequence
  Description of Artificial Sequence:  Hypothetical Probe Sequence
ggaccacgctcattgatccc

SEQ ID NO: 8559 - DNA, 20 bp, Artificial Sequence
  Description of Artificial Sequence:  Hypothetical Probe Sequence
ggaccacggctttctgcacg

SEQ ID NO: 8560 - DNA, 20 bp, Artificial Sequence
  Description of Artificial Sequence:  Hypothetical Probe Sequence
ggaccacggagtatcgctca

SEQ ID NO: 8561 - DNA, 20 bp, Artificial Sequence
  Description of Artificial Sequence:  Hypothetical Probe Sequence
ggaccacgcacgctcagtgc

SEQ ID NO: 8562 - DNA, 20 bp, Artificial Sequence
  Description of Artificial Sequence:  Hypothetical Probe Sequence
ggaccacgacggtctgtgcg

SEQ ID NO: 8563 - DNA, 20 bp, Artificial Sequence
  Description of Artificial Sequence:  Hypothetical Probe Sequence
ggaccacgagcccgaacgtt

SEQ ID NO: 8564 - DNA, 20 bp, Artificial Sequence
  Description of Artificial Sequence:  Hypothetical Probe Sequence
cagcttgatcgtcgaaacgg

SEQ ID NO: 8565 - DNA, 20 bp, Artificial Sequence
  Description of Artificial Sequence:  Hypothetical Probe Sequence
ggaccagctgtccagcagga

SEQ ID NO: 8566 - DNA, 20 bp, Artificial Sequence
  Description of Artificial Sequence:  Hypothetical Probe Sequence
ggaccagccttgtgcgacgg

SEQ ID NO: 8567 - DNA, 20 bp, Artificial Sequence
  Description of Artificial Sequence:  Hypothetical Probe Sequence
cagcctgtggactgtccacg

SEQ ID NO: 8568 - DNA, 20 bp, Artificial Sequence
  Description of Artificial Sequence:  Hypothetical Probe Sequence
cagcggtatgatgaccagcc

SEQ ID NO: 8569 - DNA, 20 bp, Artificial Sequence
  Description of Artificial Sequence:  Hypothetical Probe Sequence
cagcagtgacctgtgcgctt

SEQ ID NO: 8570 - DNA, 20 bp, Artificial Sequence
  Description of Artificial Sequence:  Hypothetical Probe Sequence
ggaccagctgcggaccctca

SEQ ID NO: 8571 - DNA, 20 bp, Artificial Sequence
  Description of Artificial Sequence:  Hypothetical Probe Sequence
ggacgaccttgagtgcgcaa

SEQ ID NO: 8572 - DNA, 20 bp, Artificial Sequence
  Description of Artificial Sequence:  Hypothetical Probe Sequence
ggacgaccctgtagtgcgtt

SEQ ID NO: 8573 - DNA, 20 bp, Artificial Sequence
  Description of Artificial Sequence:  Hypothetical Probe Sequence
ggacgaccggtagtgcagcc

SEQ ID NO: 8574 - DNA, 20 bp, Artificial Sequence
  Description of Artificial Sequence:  Hypothetical Probe Sequence
ggacgaccgtctgtgcacct

SEQ ID NO: 8575 - DNA, 20 bp, Artificial Sequence
  Description of Artificial Sequence:  Hypothetical Probe Sequence
ggacgaccgagtcttgggac

SEQ ID NO: 8576 - DNA, 20 bp, Artificial Sequence
  Description of Artificial Sequence:  Hypothetical Probe Sequence
gaccagtgaaaggtgcagcc

SEQ ID NO: 8577 - DNA, 20 bp, Artificial Sequence
  Description of Artificial Sequence:  Hypothetical Probe Sequence
ggacgaccgaccccatctca

SEQ ID NO: 8578 - DNA, 20 bp, Artificial Sequence
  Description of Artificial Sequence:  Hypothetical Probe Sequence
ggacgtgctgattgattccc

SEQ ID NO: 8579 - DNA, 20 bp, Artificial Sequence
  Description of Artificial Sequence:  Hypothetical Probe Sequence
ggacgtgcaatcggaccgtt

SEQ ID NO: 8580 - DNA, 20 bp, Artificial Sequence
  Description of Artificial Sequence:  Hypothetical Probe Sequence
ggacgtgctctgtcgtccat

SEQ ID NO: 8581 - DNA, 20 bp, Artificial Sequence
  Description of Artificial Sequence:  Hypothetical Probe Sequence
ggacgtgctgtccagcacgg

SEQ ID NO: 8582 - DNA, 20 bp, Artificial Sequence
  Description of Artificial Sequence:  Hypothetical Probe Sequence
ggacgtgctcgtcgaagcaa

SEQ ID NO: 8583 - DNA, 20 bp, Artificial Sequence
  Description of Artificial Sequence:  Hypothetical Probe Sequence
ggacgtgccgttgcttcgaa

SEQ ID NO: 8584 - DNA, 20 bp, Artificial Sequence
  Description of Artificial Sequence:  Hypothetical Probe Sequence
gtgccgaaatactcccgtgc

SEQ ID NO: 8585 - DNA, 20 bp, Artificial Sequence
  Description of Artificial Sequence:  Hypothetical Probe Sequence
ggacgtgcggtatgtcggac

SEQ ID NO: 8586 - DNA, 20 bp, Artificial Sequence
  Description of Artificial Sequence:  Hypothetical Probe Sequence
ggacgtgcagtggtgctgcg

SEQ ID NO: 8587 - DNA, 20 bp, Artificial Sequence
  Description of Artificial Sequence:  Hypothetical Probe Sequence
ggacgtgccctacctatcgt

SEQ ID NO: 8588 - DNA, 20 bp, Artificial Sequence
  Description of Artificial Sequence:  Hypothetical Probe Sequence
ggacgtgctgcgtgtccttg

SEQ ID NO: 8589 - DNA, 20 bp, Artificial Sequence
  Description of Artificial Sequence:  Hypothetical Probe Sequence
ggacgtgccacgggacagtg

SEQ ID NO: 8590 - DNA, 20 bp, Artificial Sequence
  Description of Artificial Sequence:  Hypothetical Probe Sequence
ggacgtgcacggtgattgtc

SEQ ID NO: 8591 - DNA, 20 bp, Artificial Sequence
  Description of Artificial Sequence:  Hypothetical Probe Sequence
ggacggactcgtctgtcacg

SEQ ID NO: 8592 - DNA, 20 bp, Artificial Sequence
  Description of Artificial Sequence:  Hypothetical Probe Sequence
ggacggaccgttttaggacc

SEQ ID NO: 8593 - DNA, 20 bp, Artificial Sequence
  Description of Artificial Sequence:  Hypothetical Probe Sequence
ggacctgttacatccccacg

SEQ ID NO: 8594 - DNA, 20 bp, Artificial Sequence
  Description of Artificial Sequence:  Hypothetical Probe Sequence
ggacggaccgaagatgcagc

SEQ ID NO: 8595 - DNA, 20 bp, Artificial Sequence
  Description of Artificial Sequence:  Hypothetical Probe Sequence
ggacggacgagttacatgcg

SEQ ID NO: 8596 - DNA, 20 bp, Artificial Sequence
  Description of Artificial Sequence:  Hypothetical Probe Sequence
ggacacctgcaacttggcaa

SEQ ID NO: 8597 - DNA, 20 bp, Artificial Sequence
  Description of Artificial Sequence:  Hypothetical Probe Sequence
ggacggacgatgttagacgg

SEQ ID NO: 8598 - DNA, 20 bp, Artificial Sequence
  Description of Artificial Sequence:  Hypothetical Probe Sequence
ggacggactcccagtgacgg

SEQ ID NO: 8599 - DNA, 20 bp, Artificial Sequence
  Description of Artificial Sequence:  Hypothetical Probe Sequence
ggacggactgcgaggatctg

SEQ ID NO: 8600 - DNA, 20 bp, Artificial Sequence
  Description of Artificial Sequence:  Hypothetical Probe Sequence
ggacggaccagcccatgctt

SEQ ID NO: 8601 - DNA, 20 bp, Artificial Sequence
  Description of Artificial Sequence:  Hypothetical Probe Sequence
acggttaggacctgcgagcc

SEQ ID NO: 8602 - DNA, 20 bp, Artificial Sequence
  Description of Artificial Sequence:  Hypothetical Probe Sequence
acggtctgagcctcgtgtgc

SEQ ID NO: 8603 - DNA, 20 bp, Artificial Sequence
  Description of Artificial Sequence:  Hypothetical Probe Sequence
ggacacggcgttaatctgcg

SEQ ID NO: 8604 - DNA, 20 bp, Artificial Sequence
  Description of Artificial Sequence:  Hypothetical Probe Sequence
acggctgttacagctttccc

SEQ ID NO: 8605 - DNA, 20 bp, Artificial Sequence
  Description of Artificial Sequence:  Hypothetical Probe Sequence
acgggagtcgaaggacatcg

SEQ ID NO: 8606 - DNA, 20 bp, Artificial Sequence
  Description of Artificial Sequence:  Hypothetical Probe Sequence
acggagtgcgttcctaagcc

SEQ ID NO: 8607 - DNA, 20 bp, Artificial Sequence
  Description of Artificial Sequence:  Hypothetical Probe Sequence
agcccgttcttgaatccagc

SEQ ID NO: 8608 - DNA, 20 bp, Artificial Sequence
  Description of Artificial Sequence:  Hypothetical Probe Sequence
agccctgtaaagagccgacc

SEQ ID NO: 8609 - DNA, 20 bp, Artificial Sequence
  Description of Artificial Sequence:  Hypothetical Probe Sequence
ggacagcctgcggcaactca

SEQ ID NO: 8610 - DNA, 20 bp, Artificial Sequence
  Description of Artificial Sequence:  Hypothetical Probe Sequence
agcccacgcacgtgatgcaa

SEQ ID NO: 8611 - DNA, 20 bp, Artificial Sequence
  Description of Artificial Sequence:  Hypothetical Probe Sequence
agccgacccgttctgtcacg

SEQ ID NO: 8612 - DNA, 20 bp, Artificial Sequence
  Description of Artificial Sequence:  Hypothetical Probe Sequence
agccggaccctactcaacgg

SEQ ID NO: 8613 - DNA, 20 bp, Artificial Sequence
  Description of Artificial Sequence:  Hypothetical Probe Sequence
acggttgaccattgattgcg

SEQ ID NO: 8614 - DNA, 20 bp, Artificial Sequence
  Description of Artificial Sequence:  Hypothetical Probe Sequence
acggttgacagccacgatcg

SEQ ID NO: 8615 - DNA, 20 bp, Artificial Sequence
  Description of Artificial Sequence:  Hypothetical Probe Sequence
ttgagaccggacgatgacgg

SEQ ID NO: 8616 - DNA, 20 bp, Artificial Sequence
  Description of Artificial Sequence:  Hypothetical Probe Sequence
acggttgagtgctgcgttga

SEQ ID NO: 8617 - DNA, 20 bp, Artificial Sequence
  Description of Artificial Sequence:  Hypothetical Probe Sequence
tgatcgaagcaaatcgcagc

SEQ ID NO: 8618 - DNA, 20 bp, Artificial Sequence
  Description of Artificial Sequence:  Hypothetical Probe Sequence
acggtgatgcaaaccttccc

SEQ ID NO: 8619 - DNA, 20 bp, Artificial Sequence
  Description of Artificial Sequence:  Hypothetical Probe Sequence
acggtgatggactccctgcg

SEQ ID NO: 8620 - DNA, 20 bp, Artificial Sequence
  Description of Artificial Sequence:  Hypothetical Probe Sequence
acggttaggcaacacggatg

SEQ ID NO: 8621 - DNA, 20 bp, Artificial Sequence
  Description of Artificial Sequence:  Hypothetical Probe Sequence
acggttagtcccaaagggac

SEQ ID NO: 8622 - DNA, 20 bp, Artificial Sequence
  Description of Artificial Sequence:  Hypothetical Probe Sequence
acggttagcacgcagcttga

SEQ ID NO: 8623 - DNA, 20 bp, Artificial Sequence
  Description of Artificial Sequence:  Hypothetical Probe Sequence
acggaatcccattcgtagcc

SEQ ID NO: 8624 - DNA, 20 bp, Artificial Sequence
  Description of Artificial Sequence:  Hypothetical Probe Sequence
acggaatccgaaacctggac

SEQ ID NO: 8625 - DNA, 20 bp, Artificial Sequence
  Description of Artificial Sequence:  Hypothetical Probe Sequence
acggaatcatcgagcccagc

SEQ ID NO: 8626 - DNA, 20 bp, Artificial Sequence
  Description of Artificial Sequence:  Hypothetical Probe Sequence
aatccctacacgagccacgg

SEQ ID NO: 8627 - DNA, 20 bp, Artificial Sequence
  Description of Artificial Sequence:  Hypothetical Probe Sequence
acggaatcgatgtctggacc

SEQ ID NO: 8628 - DNA, 20 bp, Artificial Sequence
  Description of Artificial Sequence:  Hypothetical Probe Sequence
acggaatctcccggtagcaa

SEQ ID NO: 8629 - DNA, 20 bp, Artificial Sequence
  Description of Artificial Sequence:  Hypothetical Probe Sequence
acggaatcggactgatacgg

SEQ ID NO: 8630 - DNA, 20 bp, Artificial Sequence
  Description of Artificial Sequence:  Hypothetical Probe Sequence
acggataccgaacgttcgaa

SEQ ID NO: 8631 - DNA, 20 bp, Artificial Sequence
  Description of Artificial Sequence:  Hypothetical Probe Sequence
acggatacgcttgacccgtt

SEQ ID NO: 8632 - DNA, 20 bp, Artificial Sequence
  Description of Artificial Sequence:  Hypothetical Probe Sequence
atacggacttgacacgcgaa

SEQ ID NO: 8633 - DNA, 20 bp, Artificial Sequence
  Description of Artificial Sequence:  Hypothetical Probe Sequence
acggaaagctcagcaacagc

SEQ ID NO: 8634 - DNA, 20 bp, Artificial Sequence
  Description of Artificial Sequence:  Hypothetical Probe Sequence
acggaaagctgtatcgcttg

SEQ ID NO: 8635 - DNA, 20 bp, Artificial Sequence
  Description of Artificial Sequence:  Hypothetical Probe Sequence
acggaaagcgaattagacgg

SEQ ID NO: 8636 - DNA, 20 bp, Artificial Sequence
  Description of Artificial Sequence:  Hypothetical Probe Sequence
acggaaaggagtatcgtccc

SEQ ID NO: 8637 - DNA, 20 bp, Artificial Sequence
  Description of Artificial Sequence:  Hypothetical Probe Sequence
aaagaggacacgtccccagc

SEQ ID NO: 8638 - DNA, 20 bp, Artificial Sequence
  Description of Artificial Sequence:  Hypothetical Probe Sequence
acggaaagcagctcgtgtgc

SEQ ID NO: 8639 - DNA, 20 bp, Artificial Sequence
  Description of Artificial Sequence:  Hypothetical Probe Sequence
acggaaaggtgcgaccccat

SEQ ID NO: 8640 - DNA, 20 bp, Artificial Sequence
  Description of Artificial Sequence:  Hypothetical Probe Sequence
acggaaagagccggtagcaa

SEQ ID NO: 8641 - DNA, 20 bp, Artificial Sequence
  Description of Artificial Sequence:  Hypothetical Probe Sequence
tacagcttgatggctttgcg

SEQ ID NO: 8642 - DNA, 20 bp, Artificial Sequence
  Description of Artificial Sequence:  Hypothetical Probe Sequence
acggtacatgcgtccctgat

SEQ ID NO: 8643 - DNA, 20 bp, Artificial Sequence
  Description of Artificial Sequence:  Hypothetical Probe Sequence
tctgaaagcacgcacgcgaa

SEQ ID NO: 8644 - DNA, 20 bp, Artificial Sequence
  Description of Artificial Sequence:  Hypothetical Probe Sequence
acggtctgcgttgaccagtg

SEQ ID NO: 8645 - DNA, 20 bp, Artificial Sequence
  Description of Artificial Sequence:  Hypothetical Probe Sequence
acggtctgctcacgttcagc

SEQ ID NO: 8646 - DNA, 20 bp, Artificial Sequence
  Description of Artificial Sequence:  Hypothetical Probe Sequence
acggtctgctgtcgaaatcg

SEQ ID NO: 8647 - DNA, 20 bp, Artificial Sequence
  Description of Artificial Sequence:  Hypothetical Probe Sequence
acggtctgccatgtgccacg

SEQ ID NO: 8648 - DNA, 20 bp, Artificial Sequence
  Description of Artificial Sequence:  Hypothetical Probe Sequence
tctgggtattgaatcgtgcg

SEQ ID NO: 8649 - DNA, 20 bp, Artificial Sequence
  Description of Artificial Sequence:  Hypothetical Probe Sequence
tctgaggaacctagccgcaa

SEQ ID NO: 8650 - DNA, 20 bp, Artificial Sequence
  Description of Artificial Sequence:  Hypothetical Probe Sequence
acggtctgggacccatacgg

SEQ ID NO: 8651 - DNA, 20 bp, Artificial Sequence
  Description of Artificial Sequence:  Hypothetical Probe Sequence
acggtgtcctcaggacgtgc

SEQ ID NO: 8652 - DNA, 20 bp, Artificial Sequence
  Description of Artificial Sequence:  Hypothetical Probe Sequence
tgtcccatatcgaatcgctt

SEQ ID NO: 8653 - DNA, 20 bp, Artificial Sequence
  Description of Artificial Sequence:  Hypothetical Probe Sequence
tgtcggtaagtggtcttgcg

SEQ ID NO: 8654 - DNA, 20 bp, Artificial Sequence
  Description of Artificial Sequence:  Hypothetical Probe Sequence
acggtgtccacgacctgacc

SEQ ID NO: 8655 - DNA, 20 bp, Artificial Sequence
  Description of Artificial Sequence:  Hypothetical Probe Sequence
tcgttgatttgaacggcacg

SEQ ID NO: 8656 - DNA, 20 bp, Artificial Sequence
  Description of Artificial Sequence:  Hypothetical Probe Sequence
tcgtcgttttagacggcagc

SEQ ID NO: 8657 - DNA, 20 bp, Artificial Sequence
  Description of Artificial Sequence:  Hypothetical Probe Sequence
tcgtctcattagcagctgcg

SEQ ID NO: 8658 - DNA, 20 bp, Artificial Sequence
  Description of Artificial Sequence:  Hypothetical Probe Sequence
acggtcgtgcttaggacgtt

SEQ ID NO: 8659 - DNA, 20 bp, Artificial Sequence
  Description of Artificial Sequence:  Hypothetical Probe Sequence
acggtcgtaccttcgttgcg

SEQ ID NO: 8660 - DNA, 20 bp, Artificial Sequence
  Description of Artificial Sequence:  Hypothetical Probe Sequence
tcgtgatgaaagggactgcg

SEQ ID NO: 8661 - DNA, 20 bp, Artificial Sequence
  Description of Artificial Sequence:  Hypothetical Probe Sequence
acggtcgttgcgcttgtcgt

SEQ ID NO: 8662 - DNA, 20 bp, Artificial Sequence
  Description of Artificial Sequence:  Hypothetical Probe Sequence
acggtcgtgtgcccatgatg

SEQ ID NO: 8663 - DNA, 20 bp, Artificial Sequence
  Description of Artificial Sequence:  Hypothetical Probe Sequence
acggtcgtacggatactgcg

SEQ ID NO: 8664 - DNA, 20 bp, Artificial Sequence
  Description of Artificial Sequence:  Hypothetical Probe Sequence
acggcttgtctgaggagtgc

SEQ ID NO: 8665 - DNA, 20 bp, Artificial Sequence
  Description of Artificial Sequence:  Hypothetical Probe Sequence
acggcttgtcgtgcttaatc

SEQ ID NO: 8666 - DNA, 20 bp, Artificial Sequence
  Description of Artificial Sequence:  Hypothetical Probe Sequence
acggcttgggtactcacacg

SEQ ID NO: 8667 - DNA, 20 bp, Artificial Sequence
  Description of Artificial Sequence:  Hypothetical Probe Sequence
acggcttggagtcgttcagc

SEQ ID NO: 8668 - DNA, 20 bp, Artificial Sequence
  Description of Artificial Sequence:  Hypothetical Probe Sequence
acggcttgagtgtccctctg

SEQ ID NO: 8669 - DNA, 20 bp, Artificial Sequence
  Description of Artificial Sequence:  Hypothetical Probe Sequence
acggcttgacctgaccccat

SEQ ID NO: 8670 - DNA, 20 bp, Artificial Sequence
  Description of Artificial Sequence:  Hypothetical Probe Sequence
acggcttgaggaggactccc

SEQ ID NO: 8671 - DNA, 20 bp, Artificial Sequence
  Description of Artificial Sequence:  Hypothetical Probe Sequence
acggcttgcagccagctgat

SEQ ID NO: 8672 - DNA, 20 bp, Artificial Sequence
  Description of Artificial Sequence:  Hypothetical Probe Sequence
acggcttggtgcccattgat

SEQ ID NO: 8673 - DNA, 20 bp, Artificial Sequence
  Description of Artificial Sequence:  Hypothetical Probe Sequence
acggcttgggaccacgacct

SEQ ID NO: 8674 - DNA, 20 bp, Artificial Sequence
  Description of Artificial Sequence:  Hypothetical Probe Sequence
acggcttgacggataccgtt

SEQ ID NO: 8675 - DNA, 20 bp, Artificial Sequence
  Description of Artificial Sequence:  Hypothetical Probe Sequence
acggcgtttgatgatgatcg

SEQ ID NO: 8676 - DNA, 20 bp, Artificial Sequence
  Description of Artificial Sequence:  Hypothetical Probe Sequence
acggcgtttacagaccctgt

SEQ ID NO: 8677 - DNA, 20 bp, Artificial Sequence
  Description of Artificial Sequence:  Hypothetical Probe Sequence
acggcgtttctggtctcagc

SEQ ID NO: 8678 - DNA, 20 bp, Artificial Sequence
  Description of Artificial Sequence:  Hypothetical Probe Sequence
acggcgtttgtcttgaagga

SEQ ID NO: 8679 - DNA, 20 bp, Artificial Sequence
  Description of Artificial Sequence:  Hypothetical Probe Sequence
acggcgttctcattgaaaag

SEQ ID NO: 8680 - DNA, 20 bp, Artificial Sequence
  Description of Artificial Sequence:  Hypothetical Probe Sequence
acggcgttctgtacctcttg

SEQ ID NO: 8681 - DNA, 20 bp, Artificial Sequence
  Description of Artificial Sequence:  Hypothetical Probe Sequence
acggcgttgcttgcttagga

SEQ ID NO: 8682 - DNA, 20 bp, Artificial Sequence
  Description of Artificial Sequence:  Hypothetical Probe Sequence
acggcgttggtatcgtagga

SEQ ID NO: 8683 - DNA, 20 bp, Artificial Sequence
  Description of Artificial Sequence:  Hypothetical Probe Sequence
acggcgttacctagtgacgg

SEQ ID NO: 8684 - DNA, 20 bp, Artificial Sequence
  Description of Artificial Sequence:  Hypothetical Probe Sequence
acggcgttaggaatcggtct

SEQ ID NO: 8685 - DNA, 20 bp, Artificial Sequence
  Description of Artificial Sequence:  Hypothetical Probe Sequence
acggcgttcctaaatcgtgc

SEQ ID NO: 8686 - DNA, 20 bp, Artificial Sequence
  Description of Artificial Sequence:  Hypothetical Probe Sequence
acggcgtttgcgttgagatg

SEQ ID NO: 8687 - DNA, 20 bp, Artificial Sequence
  Description of Artificial Sequence:  Hypothetical Probe Sequence
acggcgttcacggtcttcgt

SEQ ID NO: 8688 - DNA, 20 bp, Artificial Sequence
  Description of Artificial Sequence:  Hypothetical Probe Sequence
acggcgttcagctgcgtgat

SEQ ID NO: 8689 - DNA, 20 bp, Artificial Sequence
  Description of Artificial Sequence:  Hypothetical Probe Sequence
acggcgttggacacctgctt

SEQ ID NO: 8690 - DNA, 20 bp, Artificial Sequence
  Description of Artificial Sequence:  Hypothetical Probe Sequence
acggcgttacggtacaatcg

SEQ ID NO: 8691 - DNA, 20 bp, Artificial Sequence
  Description of Artificial Sequence:  Hypothetical Probe Sequence
acggctcatgatcacgacgg

SEQ ID NO: 8692 - DNA, 20 bp, Artificial Sequence
  Description of Artificial Sequence:  Hypothetical Probe Sequence
acggctcattaggcaacgtt

SEQ ID NO: 8693 - DNA, 20 bp, Artificial Sequence
  Description of Artificial Sequence:  Hypothetical Probe Sequence
acggctcaaaaggtgcgcaa

SEQ ID NO: 8694 - DNA, 20 bp, Artificial Sequence
  Description of Artificial Sequence:  Hypothetical Probe Sequence
acggctcatcgtatcgagtg

SEQ ID NO: 8695 - DNA, 20 bp, Artificial Sequence
  Description of Artificial Sequence:  Hypothetical Probe Sequence
acggctcacgttctgtccat

SEQ ID NO: 8696 - DNA, 20 bp, Artificial Sequence
  Description of Artificial Sequence:  Hypothetical Probe Sequence
acggctcagcttgcaatgcg

SEQ ID NO: 8697 - DNA, 20 bp, Artificial Sequence
  Description of Artificial Sequence:  Hypothetical Probe Sequence
acggctcaggtaatacggac

SEQ ID NO: 8698 - DNA, 20 bp, Artificial Sequence
  Description of Artificial Sequence:  Hypothetical Probe Sequence
acggctcagcaaaggactgt

SEQ ID NO: 8699 - DNA, 20 bp, Artificial Sequence
  Description of Artificial Sequence:  Hypothetical Probe Sequence
acggctcacctacctaagcc

SEQ ID NO: 8700 - DNA, 20 bp, Artificial Sequence
  Description of Artificial Sequence:  Hypothetical Probe Sequence
acggctcatgcggatgagtg

SEQ ID NO: 8701 - DNA, 20 bp, Artificial Sequence
  Description of Artificial Sequence:  Hypothetical Probe Sequence
acggctcagacccttggtgc

SEQ ID NO: 8702 - DNA, 20 bp, Artificial Sequence
  Description of Artificial Sequence:  Hypothetical Probe Sequence
acggctgtaatctctgtccc

SEQ ID NO: 8703 - DNA, 20 bp, Artificial Sequence
  Description of Artificial Sequence:  Hypothetical Probe Sequence
acggctgttctgggacgacc

SEQ ID NO: 8704 - DNA, 20 bp, Artificial Sequence
  Description of Artificial Sequence:  Hypothetical Probe Sequence
acggctgtcgaaagtggacc

SEQ ID NO: 8705 - DNA, 20 bp, Artificial Sequence
  Description of Artificial Sequence:  Hypothetical Probe Sequence
acggctgtgcttctgtgcaa

SEQ ID NO: 8706 - DNA, 20 bp, Artificial Sequence
  Description of Artificial Sequence:  Hypothetical Probe Sequence
acggctgtgtcttgcggagt

SEQ ID NO: 8707 - DNA, 20 bp, Artificial Sequence
  Description of Artificial Sequence:  Hypothetical Probe Sequence
acggctgtgagtagtgagcc

SEQ ID NO: 8708 - DNA, 20 bp, Artificial Sequence
  Description of Artificial Sequence:  Hypothetical Probe Sequence
acggctgtaccttgtcagcc

SEQ ID NO: 8709 - DNA, 20 bp, Artificial Sequence
  Description of Artificial Sequence:  Hypothetical Probe Sequence
acggctgtacggtgattcgt

SEQ ID NO: 8710 - DNA, 20 bp, Artificial Sequence
  Description of Artificial Sequence:  Hypothetical Probe Sequence
acggccattgtccgtttctg

SEQ ID NO: 8711 - DNA, 20 bp, Artificial Sequence
  Description of Artificial Sequence:  Hypothetical Probe Sequence
acggccattcgtgtgcccta

SEQ ID NO: 8712 - DNA, 20 bp, Artificial Sequence
  Description of Artificial Sequence:  Hypothetical Probe Sequence
acggccatctcaacctcttg

SEQ ID NO: 8713 - DNA, 20 bp, Artificial Sequence
  Description of Artificial Sequence:  Hypothetical Probe Sequence
acggccatagtgccatagcc

SEQ ID NO: 8714 - DNA, 20 bp, Artificial Sequence
  Description of Artificial Sequence:  Hypothetical Probe Sequence
acggccatcctagctttgtc

SEQ ID NO: 8715 - DNA, 20 bp, Artificial Sequence
  Description of Artificial Sequence:  Hypothetical Probe Sequence
acggccattcccccatctgt

SEQ ID NO: 8716 - DNA, 20 bp, Artificial Sequence
  Description of Artificial Sequence:  Hypothetical Probe Sequence
acggccattgcgcgttgagt

SEQ ID NO: 8717 - DNA, 20 bp, Artificial Sequence
  Description of Artificial Sequence:  Hypothetical Probe Sequence
acggccatgaccctgtccat

SEQ ID NO: 8718 - DNA, 20 bp, Artificial Sequence
  Description of Artificial Sequence:  Hypothetical Probe Sequence
acggccatagcccctaaaag

SEQ ID NO: 8719 - DNA, 20 bp, Artificial Sequence
  Description of Artificial Sequence:  Hypothetical Probe Sequence
acggcgaattgaagtgatcg

SEQ ID NO: 8720 - DNA, 20 bp, Artificial Sequence
  Description of Artificial Sequence:  Hypothetical Probe Sequence
acggcgaatgataggacagc

SEQ ID NO: 8721 - DNA, 20 bp, Artificial Sequence
  Description of Artificial Sequence:  Hypothetical Probe Sequence
acggcgaattaggatgcttg

SEQ ID NO: 8722 - DNA, 20 bp, Artificial Sequence
  Description of Artificial Sequence:  Hypothetical Probe Sequence
acggcgaaaatctacaatcg

SEQ ID NO: 8723 - DNA, 20 bp, Artificial Sequence
  Description of Artificial Sequence:  Hypothetical Probe Sequence
acggcgaatctgtctgggta

SEQ ID NO: 8724 - DNA, 20 bp, Artificial Sequence
  Description of Artificial Sequence:  Hypothetical Probe Sequence
acggcgaatcgttgatcgtt

SEQ ID NO: 8725 - DNA, 20 bp, Artificial Sequence
  Description of Artificial Sequence:  Hypothetical Probe Sequence
acggcgaacttggagtgtgc

SEQ ID NO: 8726 - DNA, 20 bp, Artificial Sequence
  Description of Artificial Sequence:  Hypothetical Probe Sequence
acggcgaacgtttcgtctgt

SEQ ID NO: 8727 - DNA, 20 bp, Artificial Sequence
  Description of Artificial Sequence:  Hypothetical Probe Sequence
acggcgaactcattgaccat

SEQ ID NO: 8728 - DNA, 20 bp, Artificial Sequence
  Description of Artificial Sequence:  Hypothetical Probe Sequence
acggcgaaggtatctgagtg

SEQ ID NO: 8729 - DNA, 20 bp, Artificial Sequence
  Description of Artificial Sequence:  Hypothetical Probe Sequence
acggcgaagagtgatggatg

SEQ ID NO: 8730 - DNA, 20 bp, Artificial Sequence
  Description of Artificial Sequence:  Hypothetical Probe Sequence
acggcgaaatcgaggatgtc

SEQ ID NO: 8731 - DNA, 20 bp, Artificial Sequence
  Description of Artificial Sequence:  Hypothetical Probe Sequence
acggcgaatcccacctgctt

SEQ ID NO: 8732 - DNA, 20 bp, Artificial Sequence
  Description of Artificial Sequence:  Hypothetical Probe Sequence
acggcgaacacgcttggagt

SEQ ID NO: 8733 - DNA, 20 bp, Artificial Sequence
  Description of Artificial Sequence:  Hypothetical Probe Sequence
acggcgaagtgcacggtcgt

SEQ ID NO: 8734 - DNA, 20 bp, Artificial Sequence
  Description of Artificial Sequence:  Hypothetical Probe Sequence
acggcgaaggacctcacacg

SEQ ID NO: 8735 - DNA, 20 bp, Artificial Sequence
  Description of Artificial Sequence:  Hypothetical Probe Sequence
acggcgaaagccaatccgaa

SEQ ID NO: 8736 - DNA, 20 bp, Artificial Sequence
  Description of Artificial Sequence:  Hypothetical Probe Sequence
acgggcttttgacctaatcg

SEQ ID NO: 8737 - DNA, 20 bp, Artificial Sequence
  Description of Artificial Sequence:  Hypothetical Probe Sequence
acgggctttgattacatgcg

SEQ ID NO: 8738 - DNA, 20 bp, Artificial Sequence
  Description of Artificial Sequence:  Hypothetical Probe Sequence
acgggcttttaggtgccgtt

SEQ ID NO: 8739 - DNA, 20 bp, Artificial Sequence
  Description of Artificial Sequence:  Hypothetical Probe Sequence
acgggcttaaagcctatccc

SEQ ID NO: 8740 - DNA, 20 bp, Artificial Sequence
  Description of Artificial Sequence:  Hypothetical Probe Sequence
acgggctttacatcgtcagc

SEQ ID NO: 8741 - DNA, 20 bp, Artificial Sequence
  Description of Artificial Sequence:  Hypothetical Probe Sequence
acgggcttcgttctcacgtt

SEQ ID NO: 8742 - DNA, 20 bp, Artificial Sequence
  Description of Artificial Sequence:  Hypothetical Probe Sequence
acgggcttctcatcgtccta

SEQ ID NO: 8743 - DNA, 20 bp, Artificial Sequence
  Description of Artificial Sequence:  Hypothetical Probe Sequence
acgggcttctgtaggagctt

SEQ ID NO: 8744 - DNA, 20 bp, Artificial Sequence
  Description of Artificial Sequence:  Hypothetical Probe Sequence
acgggcttggtaaaagctgt

SEQ ID NO: 8745 - DNA, 20 bp, Artificial Sequence
  Description of Artificial Sequence:  Hypothetical Probe Sequence
acgggcttgagtggtagtgc

SEQ ID NO: 8746 - DNA, 20 bp, Artificial Sequence
  Description of Artificial Sequence:  Hypothetical Probe Sequence
acgggctttcccgcttccat

SEQ ID NO: 8747 - DNA, 20 bp, Artificial Sequence
  Description of Artificial Sequence:  Hypothetical Probe Sequence
acgggcttgaccttgattag

SEQ ID NO: 8748 - DNA, 20 bp, Artificial Sequence
  Description of Artificial Sequence:  Hypothetical Probe Sequence
acggggtatgatcacggatg

SEQ ID NO: 8749 - DNA, 20 bp, Artificial Sequence
  Description of Artificial Sequence:  Hypothetical Probe Sequence
acggggtatacaagccgtgc

SEQ ID NO: 8750 - DNA, 20 bp, Artificial Sequence
  Description of Artificial Sequence:  Hypothetical Probe Sequence
acggggtatctgacggagtg

SEQ ID NO: 8751 - DNA, 20 bp, Artificial Sequence
  Description of Artificial Sequence:  Hypothetical Probe Sequence
acggggtacgttcacgaatc

SEQ ID NO: 8752 - DNA, 20 bp, Artificial Sequence
  Description of Artificial Sequence:  Hypothetical Probe Sequence
acggggtactgtgagttccc

SEQ ID NO: 8753 - DNA, 20 bp, Artificial Sequence
  Description of Artificial Sequence:  Hypothetical Probe Sequence
acggggtagcttggtacagc

SEQ ID NO: 8754 - DNA, 20 bp, Artificial Sequence
  Description of Artificial Sequence:  Hypothetical Probe Sequence
acggggtagcaaaatccgaa

SEQ ID NO: 8755 - DNA, 20 bp, Artificial Sequence
  Description of Artificial Sequence:  Hypothetical Probe Sequence
acggggtaaggagtctcacg

SEQ ID NO: 8756 - DNA, 20 bp, Artificial Sequence
  Description of Artificial Sequence:  Hypothetical Probe Sequence
acggggtacctatccctcgt

SEQ ID NO: 8757 - DNA, 20 bp, Artificial Sequence
  Description of Artificial Sequence:  Hypothetical Probe Sequence
acggggtatgcgcgttagga

SEQ ID NO: 8758 - DNA, 20 bp, Artificial Sequence
  Description of Artificial Sequence:  Hypothetical Probe Sequence
acggggtagtgcatacgagt

SEQ ID NO: 8759 - DNA, 20 bp, Artificial Sequence
  Description of Artificial Sequence:  Hypothetical Probe Sequence
acggggtaggactctgcttg

SEQ ID NO: 8760 - DNA, 20 bp, Artificial Sequence
  Description of Artificial Sequence:  Hypothetical Probe Sequence
acggggtaacggcctaaatc

SEQ ID NO: 8761 - DNA, 20 bp, Artificial Sequence
  Description of Artificial Sequence:  Hypothetical Probe Sequence
acggggtaagcccgaactgt

SEQ ID NO: 8762 - DNA, 20 bp, Artificial Sequence
  Description of Artificial Sequence:  Hypothetical Probe Sequence
acgggtctaaagcgaatccc

SEQ ID NO: 8763 - DNA, 20 bp, Artificial Sequence
  Description of Artificial Sequence:  Hypothetical Probe Sequence
acgggtctcgttgcaagatg

SEQ ID NO: 8764 - DNA, 20 bp, Artificial Sequence
  Description of Artificial Sequence:  Hypothetical Probe Sequence
acgggtctctcaagccacct

SEQ ID NO: 8765 - DNA, 20 bp, Artificial Sequence
  Description of Artificial Sequence:  Hypothetical Probe Sequence
acgggtctcgaaggacgtct

SEQ ID NO: 8766 - DNA, 20 bp, Artificial Sequence
  Description of Artificial Sequence:  Hypothetical Probe Sequence
acgggtctatcgacgggctt

SEQ ID NO: 8767 - DNA, 20 bp, Artificial Sequence
  Description of Artificial Sequence:  Hypothetical Probe Sequence
acgggtctgacccttgggac

SEQ ID NO: 8768 - DNA, 20 bp, Artificial Sequence
  Description of Artificial Sequence:  Hypothetical Probe Sequence
acgggtctgtgcaaaggatg

SEQ ID NO: 8769 - DNA, 20 bp, Artificial Sequence
  Description of Artificial Sequence:  Hypothetical Probe Sequence
acgggtctacgggacctcgt

SEQ ID NO: 8770 - DNA, 20 bp, Artificial Sequence
  Description of Artificial Sequence:  Hypothetical Probe Sequence
acgggagttgatctgttccc

SEQ ID NO: 8771 - DNA, 20 bp, Artificial Sequence
  Description of Artificial Sequence:  Hypothetical Probe Sequence
acgggagtcttgcagcacct

SEQ ID NO: 8772 - DNA, 20 bp, Artificial Sequence
  Description of Artificial Sequence:  Hypothetical Probe Sequence
acgggagtctcaagccaaag

SEQ ID NO: 8773 - DNA, 20 bp, Artificial Sequence
  Description of Artificial Sequence:  Hypothetical Probe Sequence
acgggagtggtaagtggtgc

SEQ ID NO: 8774 - DNA, 20 bp, Artificial Sequence
  Description of Artificial Sequence:  Hypothetical Probe Sequence
acgggagtgatggtgctctg

SEQ ID NO: 8775 - DNA, 20 bp, Artificial Sequence
  Description of Artificial Sequence:  Hypothetical Probe Sequence
acgggagttcccctgtcacg

SEQ ID NO: 8776 - DNA, 20 bp, Artificial Sequence
  Description of Artificial Sequence:  Hypothetical Probe Sequence
acgggagtcagctgatgacc

SEQ ID NO: 8777 - DNA, 20 bp, Artificial Sequence
  Description of Artificial Sequence:  Hypothetical Probe Sequence
acgggcaaaatcagtgccat

SEQ ID NO: 8778 - DNA, 20 bp, Artificial Sequence
  Description of Artificial Sequence:  Hypothetical Probe Sequence
acgggcaaatacagtgatcg

SEQ ID NO: 8779 - DNA, 20 bp, Artificial Sequence
  Description of Artificial Sequence:  Hypothetical Probe Sequence
acgggcaatacacttgagcc

SEQ ID NO: 8780 - DNA, 20 bp, Artificial Sequence
  Description of Artificial Sequence:  Hypothetical Probe Sequence
acgggcaacgttttagccta

SEQ ID NO: 8781 - DNA, 20 bp, Artificial Sequence
  Description of Artificial Sequence:  Hypothetical Probe Sequence
acgggcaagcttcgaacagc

SEQ ID NO: 8782 - DNA, 20 bp, Artificial Sequence
  Description of Artificial Sequence:  Hypothetical Probe Sequence
acgggcaagagtctcagacc

SEQ ID NO: 8783 - DNA, 20 bp, Artificial Sequence
  Description of Artificial Sequence:  Hypothetical Probe Sequence
acgggcaagcaaatcgcgtt

SEQ ID NO: 8784 - DNA, 20 bp, Artificial Sequence
  Description of Artificial Sequence:  Hypothetical Probe Sequence
acgggcaacctacacgccta

SEQ ID NO: 8785 - DNA, 20 bp, Artificial Sequence
  Description of Artificial Sequence:  Hypothetical Probe Sequence
acgggcaaacggccatgtct

SEQ ID NO: 8786 - DNA, 20 bp, Artificial Sequence
  Description of Artificial Sequence:  Hypothetical Probe Sequence
acgggcaaagcctctgccta

SEQ ID NO: 8787 - DNA, 20 bp, Artificial Sequence
  Description of Artificial Sequence:  Hypothetical Probe Sequence
acggagtgcgaattgatcgt

SEQ ID NO: 8788 - DNA, 20 bp, Artificial Sequence
  Description of Artificial Sequence:  Hypothetical Probe Sequence
acggagtgggtacgaagtgc

SEQ ID NO: 8789 - DNA, 20 bp, Artificial Sequence
  Description of Artificial Sequence:  Hypothetical Probe Sequence
agtggagttgtctccccagc

SEQ ID NO: 8790 - DNA, 20 bp, Artificial Sequence
  Description of Artificial Sequence:  Hypothetical Probe Sequence
acggagtggcaacagccttg

SEQ ID NO: 8791 - DNA, 20 bp, Artificial Sequence
  Description of Artificial Sequence:  Hypothetical Probe Sequence
acggagtgatcgtcgtctca

SEQ ID NO: 8792 - DNA, 20 bp, Artificial Sequence
  Description of Artificial Sequence:  Hypothetical Probe Sequence
acggagtgcctacgtttgtc

SEQ ID NO: 8793 - DNA, 20 bp, Artificial Sequence
  Description of Artificial Sequence:  Hypothetical Probe Sequence
acggagtgtgcgtcgtgcaa

SEQ ID NO: 8794 - DNA, 20 bp, Artificial Sequence
  Description of Artificial Sequence:  Hypothetical Probe Sequence
acggagtgggacgcttgcaa

SEQ ID NO: 8795 - DNA, 20 bp, Artificial Sequence
  Description of Artificial Sequence:  Hypothetical Probe Sequence
accttgatgatgtcccacgg

SEQ ID NO: 8796 - DNA, 20 bp, Artificial Sequence
  Description of Artificial Sequence:  Hypothetical Probe Sequence
acggaccttgtccgttgacc

SEQ ID NO: 8797 - DNA, 20 bp, Artificial Sequence
  Description of Artificial Sequence:  Hypothetical Probe Sequence
acggacctcttgcacgccta

SEQ ID NO: 8798 - DNA, 20 bp, Artificial Sequence
  Description of Artificial Sequence:  Hypothetical Probe Sequence
acggacctgcttaaagccat

SEQ ID NO: 8799 - DNA, 20 bp, Artificial Sequence
  Description of Artificial Sequence:  Hypothetical Probe Sequence
acggacctgtctgaccccat

SEQ ID NO: 8800 - DNA, 20 bp, Artificial Sequence
  Description of Artificial Sequence:  Hypothetical Probe Sequence
acggaccttcccgagtttga

SEQ ID NO: 8801 - DNA, 20 bp, Artificial Sequence
  Description of Artificial Sequence:  Hypothetical Probe Sequence
acggacctgaccaaagacgg

SEQ ID NO: 8802 - DNA, 20 bp, Artificial Sequence
  Description of Artificial Sequence:  Hypothetical Probe Sequence
acggacctagccgctttctg

SEQ ID NO: 8803 - DNA, 20 bp, Artificial Sequence
  Description of Artificial Sequence:  Hypothetical Probe Sequence
acggatcgaaagtcccaaag

SEQ ID NO: 8804 - DNA, 20 bp, Artificial Sequence
  Description of Artificial Sequence:  Hypothetical Probe Sequence
acggatcgtgtccgaacacg

SEQ ID NO: 8805 - DNA, 20 bp, Artificial Sequence
  Description of Artificial Sequence:  Hypothetical Probe Sequence
acggatcgctcacgaatccc

SEQ ID NO: 8806 - DNA, 20 bp, Artificial Sequence
  Description of Artificial Sequence:  Hypothetical Probe Sequence
atcgctgtctgtgatgcgaa

SEQ ID NO: 8807 - DNA, 20 bp, Artificial Sequence
  Description of Artificial Sequence:  Hypothetical Probe Sequence
acggatcggagtcgaacgaa

SEQ ID NO: 8808 - DNA, 20 bp, Artificial Sequence
  Description of Artificial Sequence:  Hypothetical Probe Sequence
acggatcggcaacttggacc

SEQ ID NO: 8809 - DNA, 20 bp, Artificial Sequence
  Description of Artificial Sequence:  Hypothetical Probe Sequence
acggatcgagtgtctgccat

SEQ ID NO: 8810 - DNA, 20 bp, Artificial Sequence
  Description of Artificial Sequence:  Hypothetical Probe Sequence
acggatcgacctcttgacgg

SEQ ID NO: 8811 - DNA, 20 bp, Artificial Sequence
  Description of Artificial Sequence:  Hypothetical Probe Sequence
acggatcgcagctccctgat

SEQ ID NO: 8812 - DNA, 20 bp, Artificial Sequence
  Description of Artificial Sequence:  Hypothetical Probe Sequence
acggatcgggacggacttag

SEQ ID NO: 8813 - DNA, 20 bp, Artificial Sequence
  Description of Artificial Sequence:  Hypothetical Probe Sequence
atcgacggctcagagttgcg

SEQ ID NO: 8814 - DNA, 20 bp, Artificial Sequence
  Description of Artificial Sequence:  Hypothetical Probe Sequence
acggatcgagcccctaagga

SEQ ID NO: 8815 - DNA, 20 bp, Artificial Sequence
  Description of Artificial Sequence:  Hypothetical Probe Sequences sp.
acggaggatctggcaaacct

SEQ ID NO: 8816 - DNA, 20 bp, Artificial Sequence
  Description of Artificial Sequence:  Hypothetical Probe Sequence
acggaggaccataatcgatg

SEQ ID NO: 8817 - DNA, 20 bp, Artificial Sequence
  Description of Artificial Sequence:  Hypothetical Probe Sequence
acggaggagcttgtgccgtt

SEQ ID NO: 8818 - DNA, 20 bp, Artificial Sequence
  Description of Artificial Sequence:  Hypothetical Probe Sequence
aggaggtatcgtgtgctgcg

SEQ ID NO: 8819 - DNA, 20 bp, Artificial Sequence
  Description of Artificial Sequence:  Hypothetical Probe Sequence
aggagtctagcccacgtgcg

SEQ ID NO: 8820 - DNA, 20 bp, Artificial Sequence
  Description of Artificial Sequence:  Hypothetical Probe Sequence
acggaggagcaaagccaatc

SEQ ID NO: 8821 - DNA, 20 bp, Artificial Sequence
  Description of Artificial Sequence:  Hypothetical Probe Sequence
acggaggatgcgcctaacct

SEQ ID NO: 8822 - DNA, 20 bp, Artificial Sequence
  Description of Artificial Sequence:  Hypothetical Probe Sequence
acggcctatctggagtcagc

SEQ ID NO: 8823 - DNA, 20 bp, Artificial Sequence
  Description of Artificial Sequence:  Hypothetical Probe Sequence
acggcctactgtggacacgg

SEQ ID NO: 8824 - DNA, 20 bp, Artificial Sequence
  Description of Artificial Sequence:  Hypothetical Probe Sequence
acggcctagagttcgtggac

SEQ ID NO: 8825 - DNA, 20 bp, Artificial Sequence
  Description of Artificial Sequence:  Hypothetical Probe Sequence
acggcctacctatccctgtc

SEQ ID NO: 8826 - DNA, 20 bp, Artificial Sequence
  Description of Artificial Sequence:  Hypothetical Probe Sequence
acgggatgaatcccatagga

SEQ ID NO: 8827 - DNA, 20 bp, Artificial Sequence
  Description of Artificial Sequence:  Hypothetical Probe Sequence
acgggatgccatcgaattag

SEQ ID NO: 8828 - DNA, 20 bp, Artificial Sequence
  Description of Artificial Sequence:  Hypothetical Probe Sequence
acgggatgatcggagtcgtt

SEQ ID NO: 8829 - DNA, 20 bp, Artificial Sequence
  Description of Artificial Sequence:  Hypothetical Probe Sequence
acgggatgcctaagtgcttg

SEQ ID NO: 8830 - DNA, 20 bp, Artificial Sequence
  Description of Artificial Sequence:  Hypothetical Probe Sequence
acgggatgggaccacgatac

SEQ ID NO: 8831 - DNA, 20 bp, Artificial Sequence
  Description of Artificial Sequence:  Hypothetical Probe Sequence
acgggatgagccgtgcacgg

SEQ ID NO: 8832 - DNA, 20 bp, Artificial Sequence
  Description of Artificial Sequence:  Hypothetical Probe Sequence
acggtcccttgacgttgcaa

SEQ ID NO: 8833 - DNA, 20 bp, Artificial Sequence
  Description of Artificial Sequence:  Hypothetical Probe Sequence
acggtcccctcaaatcacgg

SEQ ID NO: 8834 - DNA, 20 bp, Artificial Sequence
  Description of Artificial Sequence:  Hypothetical Probe Sequence
acggtcccccatacctgacc

SEQ ID NO: 8835 - DNA, 20 bp, Artificial Sequence
  Description of Artificial Sequence:  Hypothetical Probe Sequence
acggtcccagtgtgtctgcg

SEQ ID NO: 8836 - DNA, 20 bp, Artificial Sequence
  Description of Artificial Sequence:  Hypothetical Probe Sequence
acggtcccatcggcttgtct

SEQ ID NO: 8837 - DNA, 20 bp, Artificial Sequence
  Description of Artificial Sequence:  Hypothetical Probe Sequence
acggtccccctatcgtgatg

SEQ ID NO: 8838 - DNA, 20 bp, Artificial Sequence
  Description of Artificial Sequence:  Hypothetical Probe Sequence
tcccgatgtgatttagcacg

SEQ ID NO: 8839 - DNA, 20 bp, Artificial Sequence
  Description of Artificial Sequence:  Hypothetical Probe Sequence
tgcgttgaatacagccgacc

SEQ ID NO: 8840 - DNA, 20 bp, Artificial Sequence
  Description of Artificial Sequence:  Hypothetical Probe Sequence
acggtgcgtgataggatctg

SEQ ID NO: 8841 - DNA, 20 bp, Artificial Sequence
  Description of Artificial Sequence:  Hypothetical Probe Sequence
acggtgcgttagggacgacc

SEQ ID NO: 8842 - DNA, 20 bp, Artificial Sequence
  Description of Artificial Sequence:  Hypothetical Probe Sequence
tgcgatacaatcatcgcgtt

SEQ ID NO: 8843 - DNA, 20 bp, Artificial Sequence
  Description of Artificial Sequence:  Hypothetical Probe Sequence
acggtgcgtacacgttggac

SEQ ID NO: 8844 - DNA, 20 bp, Artificial Sequence
  Description of Artificial Sequence:  Hypothetical Probe Sequence
acggtgcgcttgcctaagga

SEQ ID NO: 8845 - DNA, 20 bp, Artificial Sequence
  Description of Artificial Sequence:  Hypothetical Probe Sequence
acggtgcgccatatacgacc

SEQ ID NO: 8846 - DNA, 20 bp, Artificial Sequence
  Description of Artificial Sequence:  Hypothetical Probe Sequence
tgcgagtgctgtcagccagc

SEQ ID NO: 8847 - DNA, 20 bp, Artificial Sequence
  Description of Artificial Sequence:  Hypothetical Probe Sequence
tgcgaggactcagatgcagc

SEQ ID NO: 8848 - DNA, 20 bp, Artificial Sequence
  Description of Artificial Sequence:  Hypothetical Probe Sequence
acggtgcgtgcgcacgaatc

SEQ ID NO: 8849 - DNA, 20 bp, Artificial Sequence
  Description of Artificial Sequence:  Hypothetical Probe Sequence
acggtgcgcacggtgcctgt

SEQ ID NO: 8850 - DNA, 20 bp, Artificial Sequence
  Description of Artificial Sequence:  Hypothetical Probe Sequence
acggtgcgcagcacctccat

SEQ ID NO: 8851 - DNA, 20 bp, Artificial Sequence
  Description of Artificial Sequence:  Hypothetical Probe Sequence
acggtgcggtgcgagtgctt

SEQ ID NO: 8852 - DNA, 20 bp, Artificial Sequence
  Description of Artificial Sequence:  Hypothetical Probe Sequence
acggtgcgggaccagcacct

SEQ ID NO: 8853 - DNA, 20 bp, Artificial Sequence
  Description of Artificial Sequence:  Hypothetical Probe Sequence
acggtgcgagcccttggagt

SEQ ID NO: 8854 - DNA, 20 bp, Artificial Sequence
  Description of Artificial Sequence:  Hypothetical Probe Sequence
acggcacgttgaggactgat

SEQ ID NO: 8855 - DNA, 20 bp, Artificial Sequence
  Description of Artificial Sequence:  Hypothetical Probe Sequence
acggcacgtgatacggtgat

SEQ ID NO: 8856 - DNA, 20 bp, Artificial Sequence
  Description of Artificial Sequence:  Hypothetical Probe Sequence
acggcacgttagagtgatcg

SEQ ID NO: 8857 - DNA, 20 bp, Artificial Sequence
  Description of Artificial Sequence:  Hypothetical Probe Sequence
acggcacgaatccagctctg

SEQ ID NO: 8858 - DNA, 20 bp, Artificial Sequence
  Description of Artificial Sequence:  Hypothetical Probe Sequence
acggcacgtacatgattgcg

SEQ ID NO: 8859 - DNA, 20 bp, Artificial Sequence
  Description of Artificial Sequence:  Hypothetical Probe Sequence
acggcacgtctgctcaatcg

SEQ ID NO: 8860 - DNA, 20 bp, Artificial Sequence
  Description of Artificial Sequence:  Hypothetical Probe Sequence
acggcacgtcgtgcttcgaa

SEQ ID NO: 8861 - DNA, 20 bp, Artificial Sequence
  Description of Artificial Sequence:  Hypothetical Probe Sequence
acggcacggagtctcacagc

SEQ ID NO: 8862 - DNA, 20 bp, Artificial Sequence
  Description of Artificial Sequence:  Hypothetical Probe Sequence
acggcacgacctcgaatctg

SEQ ID NO: 8863 - DNA, 20 bp, Artificial Sequence
  Description of Artificial Sequence:  Hypothetical Probe Sequence
acggcacgcagctgatggac

SEQ ID NO: 8864 - DNA, 20 bp, Artificial Sequence
  Description of Artificial Sequence:  Hypothetical Probe Sequence
acggcacgggacggacggta

SEQ ID NO: 8865 - DNA, 20 bp, Artificial Sequence
  Description of Artificial Sequence:  Hypothetical Probe Sequence
acggcacgacggtcgtgagt

SEQ ID NO: 8866 - DNA, 20 bp, Artificial Sequence
  Description of Artificial Sequence:  Hypothetical Probe Sequence
acggcagcttagaaagccat

SEQ ID NO: 8867 - DNA, 20 bp, Artificial Sequence
  Description of Artificial Sequence:  Hypothetical Probe Sequence
acggcagctgtccgaaatac

SEQ ID NO: 8868 - DNA, 20 bp, Artificial Sequence
  Description of Artificial Sequence:  Hypothetical Probe Sequence
acggcagccttgctcagatg

SEQ ID NO: 8869 - DNA, 20 bp, Artificial Sequence
  Description of Artificial Sequence:  Hypothetical Probe Sequence
acggcagcctgtttagacgg

SEQ ID NO: 8870 - DNA, 20 bp, Artificial Sequence
  Description of Artificial Sequence:  Hypothetical Probe Sequence
acggcagcccataatccacg

SEQ ID NO: 8871 - DNA, 20 bp, Artificial Sequence
  Description of Artificial Sequence:  Hypothetical Probe Sequence
acggcagccgaactgttcgt

SEQ ID NO: 8872 - DNA, 20 bp, Artificial Sequence
  Description of Artificial Sequence:  Hypothetical Probe Sequence
acggcagcgcttgagtgagt

SEQ ID NO: 8873 - DNA, 20 bp, Artificial Sequence
  Description of Artificial Sequence:  Hypothetical Probe Sequence
acggcagcggtacacgttag

SEQ ID NO: 8874 - DNA, 20 bp, Artificial Sequence
  Description of Artificial Sequence:  Hypothetical Probe Sequence
acggcagcaggagtctacgg

SEQ ID NO: 8875 - DNA, 20 bp, Artificial Sequence
  Description of Artificial Sequence:  Hypothetical Probe Sequence
acggcagccacgaggagcaa

SEQ ID NO: 8876 - DNA, 20 bp, Artificial Sequence
  Description of Artificial Sequence:  Hypothetical Probe Sequence
acggcagccagcctgtcgaa

SEQ ID NO: 8877 - DNA, 20 bp, Artificial Sequence
  Description of Artificial Sequence:  Hypothetical Probe Sequence
acggcagcgtgccctatccc

SEQ ID NO: 8878 - DNA, 20 bp, Artificial Sequence
  Description of Artificial Sequence:  Hypothetical Probe Sequence
acggcagcacggtcgtgacc

SEQ ID NO: 8879 - DNA, 20 bp, Artificial Sequence
  Description of Artificial Sequence:  Hypothetical Probe Sequence
acgggaccttgattgacgtt

SEQ ID NO: 8880 - DNA, 20 bp, Artificial Sequence
  Description of Artificial Sequence:  Hypothetical Probe Sequence
acgggaccaatcacctgacc

SEQ ID NO: 8881 - DNA, 20 bp, Artificial Sequence
  Description of Artificial Sequence:  Hypothetical Probe Sequence
acgggaccaaagaatcgatg

SEQ ID NO: 8882 - DNA, 20 bp, Artificial Sequence
  Description of Artificial Sequence:  Hypothetical Probe Sequence
acgggacctacacagcgcaa

SEQ ID NO: 8883 - DNA, 20 bp, Artificial Sequence
  Description of Artificial Sequence:  Hypothetical Probe Sequence
acgggacccgttgtcttcgt

SEQ ID NO: 8884 - DNA, 20 bp, Artificial Sequence
  Description of Artificial Sequence:  Hypothetical Probe Sequence
acgggaccctcagtgcgatg

SEQ ID NO: 8885 - DNA, 20 bp, Artificial Sequence
  Description of Artificial Sequence:  Hypothetical Probe Sequence
acgggaccccatacctcgaa

SEQ ID NO: 8886 - DNA, 20 bp, Artificial Sequence
  Description of Artificial Sequence:  Hypothetical Probe Sequence
acgggacccgaactcatgtc

SEQ ID NO: 8887 - DNA, 20 bp, Artificial Sequence
  Description of Artificial Sequence:  Hypothetical Probe Sequence
acgggaccgcttaatcccta

SEQ ID NO: 8888 - DNA, 20 bp, Artificial Sequence
  Description of Artificial Sequence:  Hypothetical Probe Sequence
acgggaccatcgtcccacct

SEQ ID NO: 8889 - DNA, 20 bp, Artificial Sequence
  Description of Artificial Sequence:  Hypothetical Probe Sequence
acgggaccgatggatgcagc

SEQ ID NO: 8890 - DNA, 20 bp, Artificial Sequence
  Description of Artificial Sequence:  Hypothetical Probe Sequence
acgggacctcccatcgggta

SEQ ID NO: 8891 - DNA, 20 bp, Artificial Sequence
  Description of Artificial Sequence:  Hypothetical Probe Sequence
acgggacccagccgaaccta

SEQ ID NO: 8892 - DNA, 20 bp, Artificial Sequence
  Description of Artificial Sequence:  Hypothetical Probe Sequence
acgggaccgtgcggacttag

SEQ ID NO: 8893 - DNA, 20 bp, Artificial Sequence
  Description of Artificial Sequence:  Hypothetical Probe Sequence
acgggtgcttgagtctagcc

SEQ ID NO: 8894 - DNA, 20 bp, Artificial Sequence
  Description of Artificial Sequence:  Hypothetical Probe Sequence
acgggtgctgatttgaatcg

SEQ ID NO: 8895 - DNA, 20 bp, Artificial Sequence
  Description of Artificial Sequence:  Hypothetical Probe Sequence
acgggtgcttagtctggctt

SEQ ID NO: 8896 - DNA, 20 bp, Artificial Sequence
  Description of Artificial Sequence:  Hypothetical Probe Sequence
acgggtgcaatcgcttcttg

SEQ ID NO: 8897 - DNA, 20 bp, Artificial Sequence
  Description of Artificial Sequence:  Hypothetical Probe Sequence
acgggtgcatacacctgacc

SEQ ID NO: 8898 - DNA, 20 bp, Artificial Sequence
  Description of Artificial Sequence:  Hypothetical Probe Sequence
acgggtgctgtcggactctg

SEQ ID NO: 8899 - DNA, 20 bp, Artificial Sequence
  Description of Artificial Sequence:  Hypothetical Probe Sequence
acgggtgcctcactgttgtc

SEQ ID NO: 8900 - DNA, 20 bp, Artificial Sequence
  Description of Artificial Sequence:  Hypothetical Probe Sequence
acgggtgccgaagaccccta

SEQ ID NO: 8901 - DNA, 20 bp, Artificial Sequence
  Description of Artificial Sequence:  Hypothetical Probe Sequence
acgggtgcgcttgcttttga

SEQ ID NO: 8902 - DNA, 20 bp, Artificial Sequence
  Description of Artificial Sequence:  Hypothetical Probe Sequence
acgggtgcgtctcctaacgg

SEQ ID NO: 8903 - DNA, 20 bp, Artificial Sequence
  Description of Artificial Sequence:  Hypothetical Probe Sequence
acgggtgcgcaacagctgat

SEQ ID NO: 8904 - DNA, 20 bp, Artificial Sequence
  Description of Artificial Sequence:  Hypothetical Probe Sequence
acgggtgcagtggaccacgg

SEQ ID NO: 8905 - DNA, 20 bp, Artificial Sequence
  Description of Artificial Sequence:  Hypothetical Probe Sequence
acgggtgcacctgcaactca

SEQ ID NO: 8906 - DNA, 20 bp, Artificial Sequence
  Description of Artificial Sequence:  Hypothetical Probe Sequence
acgggtgctgcgaggaatac

SEQ ID NO: 8907 - DNA, 20 bp, Artificial Sequence
  Description of Artificial Sequence:  Hypothetical Probe Sequence
acgggtgcgaccatcgggta

SEQ ID NO: 8908 - DNA, 20 bp, Artificial Sequence
  Description of Artificial Sequence:  Hypothetical Probe Sequence
acgggtgcggaccacgggta

SEQ ID NO: 8909 - DNA, 20 bp, Artificial Sequence
  Description of Artificial Sequence:  Hypothetical Probe Sequence
acggggacttgaaaagttga

SEQ ID NO: 8910 - DNA, 20 bp, Artificial Sequence
  Description of Artificial Sequence:  Hypothetical Probe Sequence
acggggacttagtgcggcaa

SEQ ID NO: 8911 - DNA, 20 bp, Artificial Sequence
  Description of Artificial Sequence:  Hypothetical Probe Sequence
acggggactacaacggggac

SEQ ID NO: 8912 - DNA, 20 bp, Artificial Sequence
  Description of Artificial Sequence:  Hypothetical Probe Sequence
acggggaccttgacggttga

SEQ ID NO: 8913 - DNA, 20 bp, Artificial Sequence
  Description of Artificial Sequence:  Hypothetical Probe Sequence
acggggaccgttatcgcgaa

SEQ ID NO: 8914 - DNA, 20 bp, Artificial Sequence
  Description of Artificial Sequence:  Hypothetical Probe Sequence
acggggacggtaaggaaatc

SEQ ID NO: 8915 - DNA, 20 bp, Artificial Sequence
  Description of Artificial Sequence:  Hypothetical Probe Sequence
acggggacgcaaagtgccat

SEQ ID NO: 8916 - DNA, 20 bp, Artificial Sequence
  Description of Artificial Sequence:  Hypothetical Probe Sequence
acggggacacctgagttccc

SEQ ID NO: 8917 - DNA, 20 bp, Artificial Sequence
  Description of Artificial Sequence:  Hypothetical Probe Sequence
acggggacatcgtcccatcg

SEQ ID NO: 8918 - DNA, 20 bp, Artificial Sequence
  Description of Artificial Sequence:  Hypothetical Probe Sequence
acggggactcccgatgctca

SEQ ID NO: 8919 - DNA, 20 bp, Artificial Sequence
  Description of Artificial Sequence:  Hypothetical Probe Sequence
acggggactgcgctgtgctt

SEQ ID NO: 8920 - DNA, 20 bp, Artificial Sequence
  Description of Artificial Sequence:  Hypothetical Probe Sequence
acggggacgtgcgcaaccta

SEQ ID NO: 8921 - DNA, 20 bp, Artificial Sequence
  Description of Artificial Sequence:  Hypothetical Probe Sequence
acggacggttgaggtacacg

SEQ ID NO: 8922 - DNA, 20 bp, Artificial Sequence
  Description of Artificial Sequence:  Hypothetical Probe Sequence
acggacggtacacgaacagc

SEQ ID NO: 8923 - DNA, 20 bp, Artificial Sequence
  Description of Artificial Sequence:  Hypothetical Probe Sequence
acggtctgaatcaccttgcg

SEQ ID NO: 8924 - DNA, 20 bp, Artificial Sequence
  Description of Artificial Sequence:  Hypothetical Probe Sequence
acggacggtcgtggtagacc

SEQ ID NO: 8925 - DNA, 20 bp, Artificial Sequence
  Description of Artificial Sequence:  Hypothetical Probe Sequence
acggacggctcagtcttccc

SEQ ID NO: 8926 - DNA, 20 bp, Artificial Sequence
  Description of Artificial Sequence:  Hypothetical Probe Sequence
acgggagttcgtaatctgcg

SEQ ID NO: 8927 - DNA, 20 bp, Artificial Sequence
  Description of Artificial Sequence:  Hypothetical Probe Sequence
acggacgggcaatcgtcagc

SEQ ID NO: 8928 - DNA, 20 bp, Artificial Sequence
  Description of Artificial Sequence:  Hypothetical Probe Sequence
acggacggacctggtagtgc

SEQ ID NO: 8929 - DNA, 20 bp, Artificial Sequence
  Description of Artificial Sequence:  Hypothetical Probe Sequence
acggacgggatgtcccaaag

SEQ ID NO: 8930 - DNA, 20 bp, Artificial Sequence
  Description of Artificial Sequence:  Hypothetical Probe Sequence
acggacggtccctctgggta

SEQ ID NO: 8931 - DNA, 20 bp, Artificial Sequence
  Description of Artificial Sequence:  Hypothetical Probe Sequence
acggacggcagcttgacgaa

SEQ ID NO: 8932 - DNA, 20 bp, Artificial Sequence
  Description of Artificial Sequence:  Hypothetical Probe Sequence
acggacgggtgcctgtcgaa

SEQ ID NO: 8933 - DNA, 20 bp, Artificial Sequence
  Description of Artificial Sequence:  Hypothetical Probe Sequence
acggacggagccgcttgtct

SEQ ID NO: 8934 - DNA, 20 bp, Artificial Sequence
  Description of Artificial Sequence:  Hypothetical Probe Sequence
acggagccttagcttggacc

SEQ ID NO: 8935 - DNA, 20 bp, Artificial Sequence
  Description of Artificial Sequence:  Hypothetical Probe Sequence
agccaatcgtctatcggcaa

SEQ ID NO: 8936 - DNA, 20 bp, Artificial Sequence
  Description of Artificial Sequence:  Hypothetical Probe Sequence
acggagcctgtccgaagcaa

SEQ ID NO: 8937 - DNA, 20 bp, Artificial Sequence
  Description of Artificial Sequence:  Hypothetical Probe Sequence
acggagcctcgtggtatgat

SEQ ID NO: 8938 - DNA, 20 bp, Artificial Sequence
  Description of Artificial Sequence:  Hypothetical Probe Sequence
acggagccctgttcccaatc

SEQ ID NO: 8939 - DNA, 20 bp, Artificial Sequence
  Description of Artificial Sequence:  Hypothetical Probe Sequence
acggagcccgaagatgggta

SEQ ID NO: 8940 - DNA, 20 bp, Artificial Sequence
  Description of Artificial Sequence:  Hypothetical Probe Sequence
acggagccagtgggactgtc

SEQ ID NO: 8941 - DNA, 20 bp, Artificial Sequence
  Description of Artificial Sequence:  Hypothetical Probe Sequence
acggagcccctatacatccc

SEQ ID NO: 8942 - DNA, 20 bp, Artificial Sequence
  Description of Artificial Sequence:  Hypothetical Probe Sequence
acggagccgatgaatcagga

SEQ ID NO: 8943 - DNA, 20 bp, Artificial Sequence
  Description of Artificial Sequence:  Hypothetical Probe Sequence
acggagcctcccgcaaggta

SEQ ID NO: 8944 - DNA, 20 bp, Artificial Sequence
  Description of Artificial Sequence:  Hypothetical Probe Sequence
acggagcccagcgatgttga

SEQ ID NO: 8945 - DNA, 20 bp, Artificial Sequence
  Description of Artificial Sequence:  Hypothetical Probe Sequence
agccgacccctatgtccacg

SEQ ID NO: 8946 - DNA, 20 bp, Artificial Sequence
  Description of Artificial Sequence:  Hypothetical Probe Sequence
acggagccggacgatgctgt

SEQ ID NO: 8947 - DNA, 20 bp, Artificial Sequence
  Description of Artificial Sequence:  Hypothetical Probe Sequence
acggagccacggttgacgtt

SEQ ID NO: 8948 - DNA, 20 bp, Artificial Sequence
  Description of Artificial Sequence:  Hypothetical Probe Sequence
agccttgaaaagtgcgcgaa

SEQ ID NO: 8949 - DNA, 20 bp, Artificial Sequence
  Description of Artificial Sequence:  Hypothetical Probe Sequence
ttgatcgtgcttgcaaagcc

SEQ ID NO: 8950 - DNA, 20 bp, Artificial Sequence
  Description of Artificial Sequence:  Hypothetical Probe Sequence
ttgacgttctcaagcccacg

SEQ ID NO: 8951 - DNA, 20 bp, Artificial Sequence
  Description of Artificial Sequence:  Hypothetical Probe Sequence
ttgagcttgtgcacgggacc

SEQ ID NO: 8952 - DNA, 20 bp, Artificial Sequence
  Description of Artificial Sequence:  Hypothetical Probe Sequence
ttgagcaatgtcgatgcgaa

SEQ ID NO: 8953 - DNA, 20 bp, Artificial Sequence
  Description of Artificial Sequence:  Hypothetical Probe Sequence
ttgaaggaacctggaccgaa

SEQ ID NO: 8954 - DNA, 20 bp, Artificial Sequence
  Description of Artificial Sequence:  Hypothetical Probe Sequence
ttgagatgtgcgacggcgtt

SEQ ID NO: 8955 - DNA, 20 bp, Artificial Sequence
  Description of Artificial Sequence:  Hypothetical Probe Sequence
ttgaggacgcaacttgtgcg

SEQ ID NO: 8956 - DNA, 20 bp, Artificial Sequence
  Description of Artificial Sequence:  Hypothetical Probe Sequence
tgatgcttacggtgtctgcg

SEQ ID NO: 8957 - DNA, 20 bp, Artificial Sequence
  Description of Artificial Sequence:  Hypothetical Probe Sequence
agccttaggcttcagcgatg

SEQ ID NO: 8958 - DNA, 20 bp, Artificial Sequence
  Description of Artificial Sequence:  Hypothetical Probe Sequence
agccttagcagcatcgcttg

SEQ ID NO: 8959 - DNA, 20 bp, Artificial Sequence
  Description of Artificial Sequence:  Hypothetical Probe Sequence
agccaatccgtttgtcgtgc

SEQ ID NO: 8960 - DNA, 20 bp, Artificial Sequence
  Description of Artificial Sequence:  Hypothetical Probe Sequence
agccaatcgcaagagtacgg

SEQ ID NO: 8961 - DNA, 20 bp, Artificial Sequence
  Description of Artificial Sequence:  Hypothetical Probe Sequence
agccaatcagtgagccacgg

SEQ ID NO: 8962 - DNA, 20 bp, Artificial Sequence
  Description of Artificial Sequence:  Hypothetical Probe Sequence
agccaatcaggatgcggctt

SEQ ID NO: 8963 - DNA, 20 bp, Artificial Sequence
  Description of Artificial Sequence:  Hypothetical Probe Sequence
aatccctatgtctccccacg

SEQ ID NO: 8964 - DNA, 20 bp, Artificial Sequence
  Description of Artificial Sequence:  Hypothetical Probe Sequence
agccaatcgatgaaagtgcg

SEQ ID NO: 8965 - DNA, 20 bp, Artificial Sequence
  Description of Artificial Sequence:  Hypothetical Probe Sequence
agccaatcggactacacacg

SEQ ID NO: 8966 - DNA, 20 bp, Artificial Sequence
  Description of Artificial Sequence:  Hypothetical Probe Sequence
agccaatcagccctgtacgg

SEQ ID NO: 8967 - DNA, 20 bp, Artificial Sequence
  Description of Artificial Sequence:  Hypothetical Probe Sequence
agccataccgttacggtgtc

SEQ ID NO: 8968 - DNA, 20 bp, Artificial Sequence
  Description of Artificial Sequence:  Hypothetical Probe Sequence
agccatacgcttctcaatcg

SEQ ID NO: 8969 - DNA, 20 bp, Artificial Sequence
  Description of Artificial Sequence:  Hypothetical Probe Sequence
agccatacacctggacccat

SEQ ID NO: 8970 - DNA, 20 bp, Artificial Sequence
  Description of Artificial Sequence:  Hypothetical Probe Sequence
agccatacaggatcccgtgc

SEQ ID NO: 8971 - DNA, 20 bp, Artificial Sequence
  Description of Artificial Sequence:  Hypothetical Probe Sequence
agccataccagcgaccggac

SEQ ID NO: 8972 - DNA, 20 bp, Artificial Sequence
  Description of Artificial Sequence:  Hypothetical Probe Sequence
agccatacgtgcctcatgcg

SEQ ID NO: 8973 - DNA, 20 bp, Artificial Sequence
  Description of Artificial Sequence:  Hypothetical Probe Sequence
agccaaagtgattcccgacc

SEQ ID NO: 8974 - DNA, 20 bp, Artificial Sequence
  Description of Artificial Sequence:  Hypothetical Probe Sequence
aaagtctggcaagctttgcg

SEQ ID NO: 8975 - DNA, 20 bp, Artificial Sequence
  Description of Artificial Sequence:  Hypothetical Probe Sequence
agccaaaggcaaggacagtg

SEQ ID NO: 8976 - DNA, 20 bp, Artificial Sequence
  Description of Artificial Sequence:  Hypothetical Probe Sequence
aaagagtggtgcgtgcacgg

SEQ ID NO: 8977 - DNA, 20 bp, Artificial Sequence
  Description of Artificial Sequence:  Hypothetical Probe Sequence
agccaaagaggactcacgaa

SEQ ID NO: 8978 - DNA, 20 bp, Artificial Sequence
  Description of Artificial Sequence:  Hypothetical Probe Sequence
agccaaagcctatgattccc

SEQ ID NO: 8979 - DNA, 20 bp, Artificial Sequence
  Description of Artificial Sequence:  Hypothetical Probe Sequence
agccaaaggaccttgacacg

SEQ ID NO: 8980 - DNA, 20 bp, Artificial Sequence
  Description of Artificial Sequence:  Hypothetical Probe Sequence
tacatgcgatactgcgccat

SEQ ID NO: 8981 - DNA, 20 bp, Artificial Sequence
  Description of Artificial Sequence:  Hypothetical Probe Sequence
tctgcttgttgacacgcacg

SEQ ID NO: 8982 - DNA, 20 bp, Artificial Sequence
  Description of Artificial Sequence:  Hypothetical Probe Sequence
tctgctcagaccggacgctt

SEQ ID NO: 8983 - DNA, 20 bp, Artificial Sequence
  Description of Artificial Sequence:  Hypothetical Probe Sequence
agcctctgctgtatcgcgaa

SEQ ID NO: 8984 - DNA, 20 bp, Artificial Sequence
  Description of Artificial Sequence:  Hypothetical Probe Sequence
agcctctggagtcacgcgaa

SEQ ID NO: 8985 - DNA, 20 bp, Artificial Sequence
  Description of Artificial Sequence:  Hypothetical Probe Sequence
tctggatgaaaggatggcaa

SEQ ID NO: 8986 - DNA, 20 bp, Artificial Sequence
  Description of Artificial Sequence:  Hypothetical Probe Sequence
agcctctgggacatcgagcc

SEQ ID NO: 8987 - DNA, 20 bp, Artificial Sequence
  Description of Artificial Sequence:  Hypothetical Probe Sequence
agcctgtctgcgcgaataca

SEQ ID NO: 8988 - DNA, 20 bp, Artificial Sequence
  Description of Artificial Sequence:  Hypothetical Probe Sequence
agcctgtccagcaaagcagc

SEQ ID NO: 8989 - DNA, 20 bp, Artificial Sequence
  Description of Artificial Sequence:  Hypothetical Probe Sequence
agcctcgtttgatgtcgctt

SEQ ID NO: 8990 - DNA, 20 bp, Artificial Sequence
  Description of Artificial Sequence:  Hypothetical Probe Sequence
tcgttgtctacatgcggacc

SEQ ID NO: 8991 - DNA, 20 bp, Artificial Sequence
  Description of Artificial Sequence:  Hypothetical Probe Sequence
agcctcgtgagtggacagcc

SEQ ID NO: 8992 - DNA, 20 bp, Artificial Sequence
  Description of Artificial Sequence:  Hypothetical Probe Sequence
agcctcgtgcaacgaagcaa

SEQ ID NO: 8993 - DNA, 20 bp, Artificial Sequence
  Description of Artificial Sequence:  Hypothetical Probe Sequence
agcctcgtacctcgaaagcc

SEQ ID NO: 8994 - DNA, 20 bp, Artificial Sequence
  Description of Artificial Sequence:  Hypothetical Probe Sequence
agcctcgttcccgacccttg

SEQ ID NO: 8995 - DNA, 20 bp, Artificial Sequence
  Description of Artificial Sequence:  Hypothetical Probe Sequence
tcgttgcgatactcgttccc

SEQ ID NO: 8996 - DNA, 20 bp, Artificial Sequence
  Description of Artificial Sequence:  Hypothetical Probe Sequence
agcccttgttgagcttgcaa

SEQ ID NO: 8997 - DNA, 20 bp, Artificial Sequence
  Description of Artificial Sequence:  Hypothetical Probe Sequence
agcccttgctcaaggattga

SEQ ID NO: 8998 - DNA, 20 bp, Artificial Sequence
  Description of Artificial Sequence:  Hypothetical Probe Sequence
agcccttgctgtacctacgg

SEQ ID NO: 8999 - DNA, 20 bp, Artificial Sequence
  Description of Artificial Sequence:  Hypothetical Probe Sequence
agcccttggtctatcgcttg

SEQ ID NO: 9000 - DNA, 20 bp, Artificial Sequence
  Description of Artificial Sequence:  Hypothetical Probe Sequence
agcccttggcaaagcctgtc

SEQ ID NO: 9001 - DNA, 20 bp, Artificial Sequence
  Description of Artificial Sequence:  Hypothetical Probe Sequence
agcccttgagtgatcgcgtt

SEQ ID NO: 9002 - DNA, 20 bp, Artificial Sequence
  Description of Artificial Sequence:  Hypothetical Probe Sequence
agcccttgcctagtctagcc

SEQ ID NO: 9003 - DNA, 20 bp, Artificial Sequence
  Description of Artificial Sequence:  Hypothetical Probe Sequence
agcccttggaccgagttccc

SEQ ID NO: 9004 - DNA, 20 bp, Artificial Sequence
  Description of Artificial Sequence:  Hypothetical Probe Sequence
agcccttgggactgtccttg

SEQ ID NO: 9005 - DNA, 20 bp, Artificial Sequence
  Description of Artificial Sequence:  Hypothetical Probe Sequence
agcccttgagccaaaggatg

SEQ ID NO: 9006 - DNA, 20 bp, Artificial Sequence
  Description of Artificial Sequence:  Hypothetical Probe Sequence
agcccgttaatcgtgcggta

SEQ ID NO: 9007 - DNA, 20 bp, Artificial Sequence
  Description of Artificial Sequence:  Hypothetical Probe Sequence
agcccgtttacaaatccgtt

SEQ ID NO: 9008 - DNA, 20 bp, Artificial Sequence
  Description of Artificial Sequence:  Hypothetical Probe Sequence
agcccgttggtacgaataca

SEQ ID NO: 9009 - DNA, 20 bp, Artificial Sequence
  Description of Artificial Sequence:  Hypothetical Probe Sequence
agcccgttgagtaaagcgtt

SEQ ID NO: 9010 - DNA, 20 bp, Artificial Sequence
  Description of Artificial Sequence:  Hypothetical Probe Sequence
agcccgttagtgaaagacgg

SEQ ID NO: 9011 - DNA, 20 bp, Artificial Sequence
  Description of Artificial Sequence:  Hypothetical Probe Sequence
agcccgttatcgtgattgcg

SEQ ID NO: 9012 - DNA, 20 bp, Artificial Sequence
  Description of Artificial Sequence:  Hypothetical Probe Sequence
agcccgtttcccgatgccat

SEQ ID NO: 9013 - DNA, 20 bp, Artificial Sequence
  Description of Artificial Sequence:  Hypothetical Probe Sequence
agcccgtttgcgcgttctca

SEQ ID NO: 9014 - DNA, 20 bp, Artificial Sequence
  Description of Artificial Sequence:  Hypothetical Probe Sequence
agcccgttgaccatactgcg

SEQ ID NO: 9015 - DNA, 20 bp, Artificial Sequence
  Description of Artificial Sequence:  Hypothetical Probe Sequence
agcccgttgtgctacaatcg

SEQ ID NO: 9016 - DNA, 20 bp, Artificial Sequence
  Description of Artificial Sequence:  Hypothetical Probe Sequence
agccctcattgatgtctgcg

SEQ ID NO: 9017 - DNA, 20 bp, Artificial Sequence
  Description of Artificial Sequence:  Hypothetical Probe Sequence
agccctcatgatccattgcg

SEQ ID NO: 9018 - DNA, 20 bp, Artificial Sequence
  Description of Artificial Sequence:  Hypothetical Probe Sequence
agccctcaaaaggcaagcaa

SEQ ID NO: 9019 - DNA, 20 bp, Artificial Sequence
  Description of Artificial Sequence:  Hypothetical Probe Sequence
agccctcacttggagttgcg

SEQ ID NO: 9020 - DNA, 20 bp, Artificial Sequence
  Description of Artificial Sequence:  Hypothetical Probe Sequence
agccctcaccatggacgctt

SEQ ID NO: 9021 - DNA, 20 bp, Artificial Sequence
  Description of Artificial Sequence:  Hypothetical Probe Sequence
agccctgttgatatcggacc

SEQ ID NO: 9022 - DNA, 20 bp, Artificial Sequence
  Description of Artificial Sequence:  Hypothetical Probe Sequence
agccctgttgtcatacgtgc

SEQ ID NO: 9023 - DNA, 20 bp, Artificial Sequence
  Description of Artificial Sequence:  Hypothetical Probe Sequence
agccctgtccatgcaagtgc

SEQ ID NO: 9024 - DNA, 20 bp, Artificial Sequence
  Description of Artificial Sequence:  Hypothetical Probe Sequence
agccctgtgctttcgtcacg

SEQ ID NO: 9025 - DNA, 20 bp, Artificial Sequence
  Description of Artificial Sequence:  Hypothetical Probe Sequence
agccctgtggtagcaaagcc

SEQ ID NO: 9026 - DNA, 20 bp, Artificial Sequence
  Description of Artificial Sequence:  Hypothetical Probe Sequence
agccctgtacctcagcgcaa

SEQ ID NO: 9027 - DNA, 20 bp, Artificial Sequence
  Description of Artificial Sequence:  Hypothetical Probe Sequence
agccctgtatcgcctaacgg

SEQ ID NO: 9028 - DNA, 20 bp, Artificial Sequence
  Description of Artificial Sequence:  Hypothetical Probe Sequence
agccctgtcacggtgccgtt

SEQ ID NO: 9029 - DNA, 20 bp, Artificial Sequence
  Description of Artificial Sequence:  Hypothetical Probe Sequence
agccctgtagcccttgggta

SEQ ID NO: 9030 - DNA, 20 bp, Artificial Sequence
  Description of Artificial Sequence:  Hypothetical Probe Sequence
agccccatttgattagcgtt

SEQ ID NO: 9031 - DNA, 20 bp, Artificial Sequence
  Description of Artificial Sequence:  Hypothetical Probe Sequence
agccccataatccgaagtgc

SEQ ID NO: 9032 - DNA, 20 bp, Artificial Sequence
  Description of Artificial Sequence:  Hypothetical Probe Sequence
agccccataaagtcccgatg

SEQ ID NO: 9033 - DNA, 20 bp, Artificial Sequence
  Description of Artificial Sequence:  Hypothetical Probe Sequence
agccccattacatcgtgacc

SEQ ID NO: 9034 - DNA, 20 bp, Artificial Sequence
  Description of Artificial Sequence:  Hypothetical Probe Sequence
agccccattgtcgtctacgg

SEQ ID NO: 9035 - DNA, 20 bp, Artificial Sequence
  Description of Artificial Sequence:  Hypothetical Probe Sequence
agccccattcgtctcagatg

SEQ ID NO: 9036 - DNA, 20 bp, Artificial Sequence
  Description of Artificial Sequence:  Hypothetical Probe Sequence
agccccatctcagatgggac

SEQ ID NO: 9037 - DNA, 20 bp, Artificial Sequence
  Description of Artificial Sequence:  Hypothetical Probe Sequence
agccccatcgaacacggtct

SEQ ID NO: 9038 - DNA, 20 bp, Artificial Sequence
  Description of Artificial Sequence:  Hypothetical Probe Sequence
agccccatcagcccataaag

SEQ ID NO: 9039 - DNA, 20 bp, Artificial Sequence
  Description of Artificial Sequence:  Hypothetical Probe Sequence
agccccatacggcctacgaa

SEQ ID NO: 9040 - DNA, 20 bp, Artificial Sequence
  Description of Artificial Sequence:  Hypothetical Probe Sequence
agcccgaattgaacctcgtt

SEQ ID NO: 9041 - DNA, 20 bp, Artificial Sequence
  Description of Artificial Sequence:  Hypothetical Probe Sequence
agcccgaaataccgaacttg

SEQ ID NO: 9042 - DNA, 20 bp, Artificial Sequence
  Description of Artificial Sequence:  Hypothetical Probe Sequence
cgaaaaagatacgtcttgcg

SEQ ID NO: 9043 - DNA, 20 bp, Artificial Sequence
  Description of Artificial Sequence:  Hypothetical Probe Sequence
agcccgaatacacttgggac

SEQ ID NO: 9044 - DNA, 20 bp, Artificial Sequence
  Description of Artificial Sequence:  Hypothetical Probe Sequence
agcccgaatcgtgtgcatcg

SEQ ID NO: 9045 - DNA, 20 bp, Artificial Sequence
  Description of Artificial Sequence:  Hypothetical Probe Sequence
agcccgaacttgggtatgcg

SEQ ID NO: 9046 - DNA, 20 bp, Artificial Sequence
  Description of Artificial Sequence:  Hypothetical Probe Sequence
agcccgaactcagtctacgg

SEQ ID NO: 9047 - DNA, 20 bp, Artificial Sequence
  Description of Artificial Sequence:  Hypothetical Probe Sequence
agcccgaacgaactgttctg

SEQ ID NO: 9048 - DNA, 20 bp, Artificial Sequence
  Description of Artificial Sequence:  Hypothetical Probe Sequence
agcccgaagcttacggagtg

SEQ ID NO: 9049 - DNA, 20 bp, Artificial Sequence
  Description of Artificial Sequence:  Hypothetical Probe Sequence
agcccgaagagtgtctgcaa

SEQ ID NO: 9050 - DNA, 20 bp, Artificial Sequence
  Description of Artificial Sequence:  Hypothetical Probe Sequence
agcccgaaatcgctgtagcc

SEQ ID NO: 9051 - DNA, 20 bp, Artificial Sequence
  Description of Artificial Sequence:  Hypothetical Probe Sequence
agcccgaaaggatctgacgg

SEQ ID NO: 9052 - DNA, 20 bp, Artificial Sequence
  Description of Artificial Sequence:  Hypothetical Probe Sequence
agcccgaatgcgcgttacct

SEQ ID NO: 9053 - DNA, 20 bp, Artificial Sequence
  Description of Artificial Sequence:  Hypothetical Probe Sequence
agcccgaacacgtcccaaag

SEQ ID NO: 9054 - DNA, 20 bp, Artificial Sequence
  Description of Artificial Sequence:  Hypothetical Probe Sequence
agcccgaaggacggtatgtc

SEQ ID NO: 9055 - DNA, 20 bp, Artificial Sequence
  Description of Artificial Sequence:  Hypothetical Probe Sequence
agcccgaaacggggactctg

SEQ ID NO: 9056 - DNA, 20 bp, Artificial Sequence
  Description of Artificial Sequence:  Hypothetical Probe Sequence
agccgctttgataggaagtg

SEQ ID NO: 9057 - DNA, 20 bp, Artificial Sequence
  Description of Artificial Sequence:  Hypothetical Probe Sequence
agccgcttttagggtacgaa

SEQ ID NO: 9058 - DNA, 20 bp, Artificial Sequence
  Description of Artificial Sequence:  Hypothetical Probe Sequence
agccgcttatactgtcagcc

SEQ ID NO: 9059 - DNA, 20 bp, Artificial Sequence
  Description of Artificial Sequence:  Hypothetical Probe Sequence
agccgctttgtcgcttggta

SEQ ID NO: 9060 - DNA, 20 bp, Artificial Sequence
  Description of Artificial Sequence:  Hypothetical Probe Sequence
agccgcttcttgtgatgcaa

SEQ ID NO: 9061 - DNA, 20 bp, Artificial Sequence
  Description of Artificial Sequence:  Hypothetical Probe Sequence
agccgcttctgttcgtgatg

SEQ ID NO: 9062 - DNA, 20 bp, Artificial Sequence
  Description of Artificial Sequence:  Hypothetical Probe Sequence
agccgcttccatttgagacc

SEQ ID NO: 9063 - DNA, 20 bp, Artificial Sequence
  Description of Artificial Sequence:  Hypothetical Probe Sequence
agccgcttggtaggacgtct

SEQ ID NO: 9064 - DNA, 20 bp, Artificial Sequence
  Description of Artificial Sequence:  Hypothetical Probe Sequence
agccgctttgcgctcaacgg

SEQ ID NO: 9065 - DNA, 20 bp, Artificial Sequence
  Description of Artificial Sequence:  Hypothetical Probe Sequence
agccgcttcagcgagtacgg

SEQ ID NO: 9066 - DNA, 20 bp, Artificial Sequence
  Description of Artificial Sequence:  Hypothetical Probe Sequence
agccgcttgtgccacgtccc

SEQ ID NO: 9067 - DNA, 20 bp, Artificial Sequence
  Description of Artificial Sequence:  Hypothetical Probe Sequence
agccggtattgatcccctca

SEQ ID NO: 9068 - DNA, 20 bp, Artificial Sequence
  Description of Artificial Sequence:  Hypothetical Probe Sequence
agccggtaaatcacctgtgc

SEQ ID NO: 9069 - DNA, 20 bp, Artificial Sequence
  Description of Artificial Sequence:  Hypothetical Probe Sequence
agccggtaaaaggtcttgcg

SEQ ID NO: 9070 - DNA, 20 bp, Artificial Sequence
  Description of Artificial Sequence:  Hypothetical Probe Sequence
agccggtatctgccatcttg

SEQ ID NO: 9071 - DNA, 20 bp, Artificial Sequence
  Description of Artificial Sequence:  Hypothetical Probe Sequence
agccggtatcgtttgacgtt

SEQ ID NO: 9072 - DNA, 20 bp, Artificial Sequence
  Description of Artificial Sequence:  Hypothetical Probe Sequence
agccggtactgttcccagcc

SEQ ID NO: 9073 - DNA, 20 bp, Artificial Sequence
  Description of Artificial Sequence:  Hypothetical Probe Sequence
agccggtaggtaccatagga

SEQ ID NO: 9074 - DNA, 20 bp, Artificial Sequence
  Description of Artificial Sequence:  Hypothetical Probe Sequence
agccggtagagtcagcatcg

SEQ ID NO: 9075 - DNA, 20 bp, Artificial Sequence
  Description of Artificial Sequence:  Hypothetical Probe Sequence
agccggtatccccttgtcgt

SEQ ID NO: 9076 - DNA, 20 bp, Artificial Sequence
  Description of Artificial Sequence:  Hypothetical Probe Sequence
agccgtctaatcggacccat

SEQ ID NO: 9077 - DNA, 20 bp, Artificial Sequence
  Description of Artificial Sequence:  Hypothetical Probe Sequence
agccgtcttacaatcgatcg

SEQ ID NO: 9078 - DNA, 20 bp, Artificial Sequence
  Description of Artificial Sequence:  Hypothetical Probe Sequence
agccgtctaccttcgtagcc

SEQ ID NO: 9079 - DNA, 20 bp, Artificial Sequence
  Description of Artificial Sequence:  Hypothetical Probe Sequence
agccgtctgatgtcgtgctt

SEQ ID NO: 9080 - DNA, 20 bp, Artificial Sequence
  Description of Artificial Sequence:  Hypothetical Probe Sequence
agccgtctcacgatcgtgtc

SEQ ID NO: 9081 - DNA, 20 bp, Artificial Sequence
  Description of Artificial Sequence:  Hypothetical Probe Sequence
agccgtctcagcacggcttg

SEQ ID NO: 9082 - DNA, 20 bp, Artificial Sequence
  Description of Artificial Sequence:  Hypothetical Probe Sequence
agccgtctgaccgagtgacc

SEQ ID NO: 9083 - DNA, 20 bp, Artificial Sequence
  Description of Artificial Sequence:  Hypothetical Probe Sequence
agccgtctagccaatcgctt

SEQ ID NO: 9084 - DNA, 20 bp, Artificial Sequence
  Description of Artificial Sequence:  Hypothetical Probe Sequence
agccgagttgtccacgccat

SEQ ID NO: 9085 - DNA, 20 bp, Artificial Sequence
  Description of Artificial Sequence:  Hypothetical Probe Sequence
agccgagttcgtgagtagcc

SEQ ID NO: 9086 - DNA, 20 bp, Artificial Sequence
  Description of Artificial Sequence:  Hypothetical Probe Sequence
agccgagtgtcttacatgcg

SEQ ID NO: 9087 - DNA, 20 bp, Artificial Sequence
  Description of Artificial Sequence:  Hypothetical Probe Sequence
agccgagtatcgcagcctgt

SEQ ID NO: 9088 - DNA, 20 bp, Artificial Sequence
  Description of Artificial Sequence:  Hypothetical Probe Sequence
agccgagtcctattgatccc

SEQ ID NO: 9089 - DNA, 20 bp, Artificial Sequence
  Description of Artificial Sequence:  Hypothetical Probe Sequence
agccgagtgatgtcccgagt

SEQ ID NO: 9090 - DNA, 20 bp, Artificial Sequence
  Description of Artificial Sequence:  Hypothetical Probe Sequence
agccgagttgcgttgactgt

SEQ ID NO: 9091 - DNA, 20 bp, Artificial Sequence
  Description of Artificial Sequence:  Hypothetical Probe Sequence
agccgagtagcccagcctca

SEQ ID NO: 9092 - DNA, 20 bp, Artificial Sequence
  Description of Artificial Sequence:  Hypothetical Probe Sequence
agccgcaattgaaggagcaa

SEQ ID NO: 9093 - DNA, 20 bp, Artificial Sequence
  Description of Artificial Sequence:  Hypothetical Probe Sequence
agccgcaatgatagcctgat

SEQ ID NO: 9094 - DNA, 20 bp, Artificial Sequence
  Description of Artificial Sequence:  Hypothetical Probe Sequence
agccgcaattagcgaatgcg

SEQ ID NO: 9095 - DNA, 20 bp, Artificial Sequence
  Description of Artificial Sequence:  Hypothetical Probe Sequence
agccgcaatacaagtgtccc

SEQ ID NO: 9096 - DNA, 20 bp, Artificial Sequence
  Description of Artificial Sequence:  Hypothetical Probe Sequence
agccgcaatctgggtaggac

SEQ ID NO: 9097 - DNA, 20 bp, Artificial Sequence
  Description of Artificial Sequence:  Hypothetical Probe Sequence
agccgcaacgtttgcgtgat

SEQ ID NO: 9098 - DNA, 20 bp, Artificial Sequence
  Description of Artificial Sequence:  Hypothetical Probe Sequence
agccgcaactcaaggaagcc

SEQ ID NO: 9099 - DNA, 20 bp, Artificial Sequence
  Description of Artificial Sequence:  Hypothetical Probe Sequence
agccgcaacgaaggtaatcg

SEQ ID NO: 9100 - DNA, 20 bp, Artificial Sequence
  Description of Artificial Sequence:  Hypothetical Probe Sequence
agccgcaagcttgagtcacg

SEQ ID NO: 9101 - DNA, 20 bp, Artificial Sequence
  Description of Artificial Sequence:  Hypothetical Probe Sequence
agccgcaagcaatccccttg

SEQ ID NO: 9102 - DNA, 20 bp, Artificial Sequence
  Description of Artificial Sequence:  Hypothetical Probe Sequence
agccgcaaatcggcaaacct

SEQ ID NO: 9103 - DNA, 20 bp, Artificial Sequence
  Description of Artificial Sequence:  Hypothetical Probe Sequence
agccgcaaaggagcaacgtt

SEQ ID NO: 9104 - DNA, 20 bp, Artificial Sequence
  Description of Artificial Sequence:  Hypothetical Probe Sequence
agccgcaatcccggtaagtg

SEQ ID NO: 9105 - DNA, 20 bp, Artificial Sequence
  Description of Artificial Sequence:  Hypothetical Probe Sequence
agccgcaatgcgatcgctca

SEQ ID NO: 9106 - DNA, 20 bp, Artificial Sequence
  Description of Artificial Sequence:  Hypothetical Probe Sequence
agccgcaacacgctgtgtgc

SEQ ID NO: 9107 - DNA, 20 bp, Artificial Sequence
  Description of Artificial Sequence:  Hypothetical Probe Sequence
agccgcaagtgcatacacgg

SEQ ID NO: 9108 - DNA, 20 bp, Artificial Sequence
  Description of Artificial Sequence:  Hypothetical Probe Sequence
agccgcaaacggcctagctt

SEQ ID NO: 9109 - DNA, 20 bp, Artificial Sequence
  Description of Artificial Sequence:  Hypothetical Probe Sequence
agccgcaaagccctgtcttg

SEQ ID NO: 9110 - DNA, 20 bp, Artificial Sequence
  Description of Artificial Sequence:  Hypothetical Probe Sequence
agccagtgtcgtatcgcacg

SEQ ID NO: 9111 - DNA, 20 bp, Artificial Sequence
  Description of Artificial Sequence:  Hypothetical Probe Sequence
agccagtgcttgagtgggac

SEQ ID NO: 9112 - DNA, 20 bp, Artificial Sequence
  Description of Artificial Sequence:  Hypothetical Probe Sequence
agccagtgctgtgatgacgg

SEQ ID NO: 9113 - DNA, 20 bp, Artificial Sequence
  Description of Artificial Sequence:  Hypothetical Probe Sequence
agccagtgggtacagcagcc

SEQ ID NO: 9114 - DNA, 20 bp, Artificial Sequence
  Description of Artificial Sequence:  Hypothetical Probe Sequence
agccagtgacctgctttccc

SEQ ID NO: 9115 - DNA, 20 bp, Artificial Sequence
  Description of Artificial Sequence:  Hypothetical Probe Sequence
agtgatcggagtacggcagc

SEQ ID NO: 9116 - DNA, 20 bp, Artificial Sequence
  Description of Artificial Sequence:  Hypothetical Probe Sequence
agccagtgtgcgataccacg

SEQ ID NO: 9117 - DNA, 20 bp, Artificial Sequence
  Description of Artificial Sequence:  Hypothetical Probe Sequence
agccagtggaccaggagcaa

SEQ ID NO: 9118 - DNA, 20 bp, Artificial Sequence
  Description of Artificial Sequence:  Hypothetical Probe Sequence
accttgtcaggacacggcaa

SEQ ID NO: 9119 - DNA, 20 bp, Artificial Sequence
  Description of Artificial Sequence:  Hypothetical Probe Sequence
agccaccttcgtaaagccat

SEQ ID NO: 9120 - DNA, 20 bp, Artificial Sequence
  Description of Artificial Sequence:  Hypothetical Probe Sequence
acctcgaatgtccttgcgaa

SEQ ID NO: 9121 - DNA, 20 bp, Artificial Sequence
  Description of Artificial Sequence:  Hypothetical Probe Sequence
acctatcgacctgatggcaa

SEQ ID NO: 9122 - DNA, 20 bp, Artificial Sequence
  Description of Artificial Sequence:  Hypothetical Probe Sequence
acctaggaagtgctcatgcg

SEQ ID NO: 9123 - DNA, 20 bp, Artificial Sequence
  Description of Artificial Sequence:  Hypothetical Probe Sequence
agccacctcacgaatctccc

SEQ ID NO: 9124 - DNA, 20 bp, Artificial Sequence
  Description of Artificial Sequence:  Hypothetical Probe Sequence
agccatcgcgaattgaggac

SEQ ID NO: 9125 - DNA, 20 bp, Artificial Sequence
  Description of Artificial Sequence:  Hypothetical Probe Sequence
agccatcggcaaaatccagc

SEQ ID NO: 9126 - DNA, 20 bp, Artificial Sequence
  Description of Artificial Sequence:  Hypothetical Probe Sequence
agccatcgcctaatacccat

SEQ ID NO: 9127 - DNA, 20 bp, Artificial Sequence
  Description of Artificial Sequence:  Hypothetical Probe Sequence
aggaatacggtatccctgcg

SEQ ID NO: 9128 - DNA, 20 bp, Artificial Sequence
  Description of Artificial Sequence:  Hypothetical Probe Sequence
aggaaaagttgacacgtgcg

SEQ ID NO: 9129 - DNA, 20 bp, Artificial Sequence
  Description of Artificial Sequence:  Hypothetical Probe Sequence
agccaggatacatgcgctca

SEQ ID NO: 9130 - DNA, 20 bp, Artificial Sequence
  Description of Artificial Sequence:  Hypothetical Probe Sequence
agccaggatctgcacgctgt

SEQ ID NO: 9131 - DNA, 20 bp, Artificial Sequence
  Description of Artificial Sequence:  Hypothetical Probe Sequence
agccaggacgtttgtctccc

SEQ ID NO: 9132 - DNA, 20 bp, Artificial Sequence
  Description of Artificial Sequence:  Hypothetical Probe Sequence
agccaggactcaagccgagt

SEQ ID NO: 9133 - DNA, 20 bp, Artificial Sequence
  Description of Artificial Sequence:  Hypothetical Probe Sequence
agccaggaccatttgagtgc

SEQ ID NO: 9134 - DNA, 20 bp, Artificial Sequence
  Description of Artificial Sequence:  Hypothetical Probe Sequence
agccaggagcaaatacgatg

SEQ ID NO: 9135 - DNA, 20 bp, Artificial Sequence
  Description of Artificial Sequence:  Hypothetical Probe Sequence
agccaggatgcgcgaaggta

SEQ ID NO: 9136 - DNA, 20 bp, Artificial Sequence
  Description of Artificial Sequence:  Hypothetical Probe Sequence
aggacagccttgaatcacgg

SEQ ID NO: 9137 - DNA, 20 bp, Artificial Sequence
  Description of Artificial Sequence:  Hypothetical Probe Sequence
agccaggagacctcgtctca

SEQ ID NO: 9138 - DNA, 20 bp, Artificial Sequence
  Description of Artificial Sequence:  Hypothetical Probe Sequence
agccaggaggacaaaggtgc

SEQ ID NO: 9139 - DNA, 20 bp, Artificial Sequence
  Description of Artificial Sequence:  Hypothetical Probe Sequence
aggaacggccataatcgcaa

SEQ ID NO: 9140 - DNA, 20 bp, Artificial Sequence
  Description of Artificial Sequence:  Hypothetical Probe Sequence
agcccctatgatagccgatg

SEQ ID NO: 9141 - DNA, 20 bp, Artificial Sequence
  Description of Artificial Sequence:  Hypothetical Probe Sequence
agcccctatgtcagcccacg

SEQ ID NO: 9142 - DNA, 20 bp, Artificial Sequence
  Description of Artificial Sequence:  Hypothetical Probe Sequence
agcccctacttgaggacagc

SEQ ID NO: 9143 - DNA, 20 bp, Artificial Sequence
  Description of Artificial Sequence:  Hypothetical Probe Sequence
agcccctactcactcaatcg

SEQ ID NO: 9144 - DNA, 20 bp, Artificial Sequence
  Description of Artificial Sequence:  Hypothetical Probe Sequence
agcccctagagtgcaatgcg

SEQ ID NO: 9145 - DNA, 20 bp, Artificial Sequence
  Description of Artificial Sequence:  Hypothetical Probe Sequence
agcccctagcaaccatgtgc

SEQ ID NO: 9146 - DNA, 20 bp, Artificial Sequence
  Description of Artificial Sequence:  Hypothetical Probe Sequence
agcccctaaccttctggctt

SEQ ID NO: 9147 - DNA, 20 bp, Artificial Sequence
  Description of Artificial Sequence:  Hypothetical Probe Sequence
agcccctagatggcaatcgt

SEQ ID NO: 9148 - DNA, 20 bp, Artificial Sequence
  Description of Artificial Sequence:  Hypothetical Probe Sequence
agcccctacacgaatcaatc

SEQ ID NO: 9149 - DNA, 20 bp, Artificial Sequence
  Description of Artificial Sequence:  Hypothetical Probe Sequence
agcccctaacggcacgctgt

SEQ ID NO: 9150 - DNA, 20 bp, Artificial Sequence
  Description of Artificial Sequence:  Hypothetical Probe Sequence
agccgatgtgatcttgatcg

SEQ ID NO: 9151 - DNA, 20 bp, Artificial Sequence
  Description of Artificial Sequence:  Hypothetical Probe Sequence
agccgatgttagttgatgcg

SEQ ID NO: 9152 - DNA, 20 bp, Artificial Sequence
  Description of Artificial Sequence:  Hypothetical Probe Sequence
agccgatgtacatgtcgacc

SEQ ID NO: 9153 - DNA, 20 bp, Artificial Sequence
  Description of Artificial Sequence:  Hypothetical Probe Sequence
agccgatgtctgaatcgcaa

SEQ ID NO: 9154 - DNA, 20 bp, Artificial Sequence
  Description of Artificial Sequence:  Hypothetical Probe Sequence
agccgatgtgtcagcctgcg

SEQ ID NO: 9155 - DNA, 20 bp, Artificial Sequence
  Description of Artificial Sequence:  Hypothetical Probe Sequence
agccgatgctcaacctgctt

SEQ ID NO: 9156 - DNA, 20 bp, Artificial Sequence
  Description of Artificial Sequence:  Hypothetical Probe Sequence
agccgatggcttagccttag

SEQ ID NO: 9157 - DNA, 20 bp, Artificial Sequence
  Description of Artificial Sequence:  Hypothetical Probe Sequence
agccgatgacctcagcccta

SEQ ID NO: 9158 - DNA, 20 bp, Artificial Sequence
  Description of Artificial Sequence:  Hypothetical Probe Sequence
agccgatgcctaccatgtgc

SEQ ID NO: 9159 - DNA, 20 bp, Artificial Sequence
  Description of Artificial Sequence:  Hypothetical Probe Sequence
agcctcccttgaaccttccc

SEQ ID NO: 9160 - DNA, 20 bp, Artificial Sequence
  Description of Artificial Sequence:  Hypothetical Probe Sequence
agcctcccatactgcgctca

SEQ ID NO: 9161 - DNA, 20 bp, Artificial Sequence
  Description of Artificial Sequence:  Hypothetical Probe Sequence
agcctccctacaaccttgcg

SEQ ID NO: 9162 - DNA, 20 bp, Artificial Sequence
  Description of Artificial Sequence:  Hypothetical Probe Sequence
agcctccctgtcaaaggtgc

SEQ ID NO: 9163 - DNA, 20 bp, Artificial Sequence
  Description of Artificial Sequence:  Hypothetical Probe Sequence
agcctccctcgtacggggta

SEQ ID NO: 9164 - DNA, 20 bp, Artificial Sequence
  Description of Artificial Sequence:  Hypothetical Probe Sequence
tccccttgttgaagtgacgg

SEQ ID NO: 9165 - DNA, 20 bp, Artificial Sequence
  Description of Artificial Sequence:  Hypothetical Probe Sequence
agcctcccccatcctaggac

SEQ ID NO: 9166 - DNA, 20 bp, Artificial Sequence
  Description of Artificial Sequence:  Hypothetical Probe Sequence
agcctccccgaatctggtgc

SEQ ID NO: 9167 - DNA, 20 bp, Artificial Sequence
  Description of Artificial Sequence:  Hypothetical Probe Sequence
tcccgtctggtaggacgctt

SEQ ID NO: 9168 - DNA, 20 bp, Artificial Sequence
  Description of Artificial Sequence:  Hypothetical Probe Sequence
agcctcccgagtcctatccc

SEQ ID NO: 9169 - DNA, 20 bp, Artificial Sequence
  Description of Artificial Sequence:  Hypothetical Probe Sequence
tcccagtgcttgcttggacc

SEQ ID NO: 9170 - DNA, 20 bp, Artificial Sequence
  Description of Artificial Sequence:  Hypothetical Probe Sequence
tcccatcgttgaaatcggac

SEQ ID NO: 9171 - DNA, 20 bp, Artificial Sequence
  Description of Artificial Sequence:  Hypothetical Probe Sequence
tcccaggacctatcgtcgaa

SEQ ID NO: 9172 - DNA, 20 bp, Artificial Sequence
  Description of Artificial Sequence:  Hypothetical Probe Sequence
agcctccccctactgtctca

SEQ ID NO: 9173 - DNA, 20 bp, Artificial Sequence
  Description of Artificial Sequence:  Hypothetical Probe Sequence
agcctcccgatggatggcaa

SEQ ID NO: 9174 - DNA, 20 bp, Artificial Sequence
  Description of Artificial Sequence:  Hypothetical Probe Sequence
agcctccctcccgcaaacct

SEQ ID NO: 9175 - DNA, 20 bp, Artificial Sequence
  Description of Artificial Sequence:  Hypothetical Probe Sequence
agcctcccgtgcatcgttga

SEQ ID NO: 9176 - DNA, 20 bp, Artificial Sequence
  Description of Artificial Sequence:  Hypothetical Probe Sequence
tcccacggccatgagtcgaa

SEQ ID NO: 9177 - DNA, 20 bp, Artificial Sequence
  Description of Artificial Sequence:  Hypothetical Probe Sequence
agcctcccagccaaagtcgt

SEQ ID NO: 9178 - DNA, 20 bp, Artificial Sequence
  Description of Artificial Sequence:  Hypothetical Probe Sequence
tgcgaatcggtaagtgcgtt

SEQ ID NO: 9179 - DNA, 20 bp, Artificial Sequence
  Description of Artificial Sequence:  Hypothetical Probe Sequence
agcctgcgaaagtctgtccc

SEQ ID NO: 9180 - DNA, 20 bp, Artificial Sequence
  Description of Artificial Sequence:  Hypothetical Probe Sequence
agcctgcgctcacttggcaa

SEQ ID NO: 9181 - DNA, 20 bp, Artificial Sequence
  Description of Artificial Sequence:  Hypothetical Probe Sequence
tgcgctgtgtcttgtccgaa

SEQ ID NO: 9182 - DNA, 20 bp, Artificial Sequence
  Description of Artificial Sequence:  Hypothetical Probe Sequence
agcctgcggagtgatgctgt

SEQ ID NO: 9183 - DNA, 20 bp, Artificial Sequence
  Description of Artificial Sequence:  Hypothetical Probe Sequence
tgcgagtggagttcccatcg

SEQ ID NO: 9184 - DNA, 20 bp, Artificial Sequence
  Description of Artificial Sequence:  Hypothetical Probe Sequence
agcctgcgaggagcttccta

SEQ ID NO: 9185 - DNA, 20 bp, Artificial Sequence
  Description of Artificial Sequence:  Hypothetical Probe Sequence
agcctgcgtgcgaaagccta

SEQ ID NO: 9186 - DNA, 20 bp, Artificial Sequence
  Description of Artificial Sequence:  Hypothetical Probe Sequence
tgcgcacgctcatctgcagc

SEQ ID NO: 9187 - DNA, 20 bp, Artificial Sequence
  Description of Artificial Sequence:  Hypothetical Probe Sequence
agcctgcggtgcgatgagcc

SEQ ID NO: 9188 - DNA, 20 bp, Artificial Sequence
  Description of Artificial Sequence:  Hypothetical Probe Sequence
agcccacgaatcgaccggta

SEQ ID NO: 9189 - DNA, 20 bp, Artificial Sequence
  Description of Artificial Sequence:  Hypothetical Probe Sequence
agcccacgtacactcaatcg

SEQ ID NO: 9190 - DNA, 20 bp, Artificial Sequence
  Description of Artificial Sequence:  Hypothetical Probe Sequence
agcccacgcttggcaaggta

SEQ ID NO: 9191 - DNA, 20 bp, Artificial Sequence
  Description of Artificial Sequence:  Hypothetical Probe Sequence
agcccacggtctaggaggta

SEQ ID NO: 9192 - DNA, 20 bp, Artificial Sequence
  Description of Artificial Sequence:  Hypothetical Probe Sequence
agcccacgaccttcccctca

SEQ ID NO: 9193 - DNA, 20 bp, Artificial Sequence
  Description of Artificial Sequence:  Hypothetical Probe Sequence
agcccacgcctacgttgctt

SEQ ID NO: 9194 - DNA, 20 bp, Artificial Sequence
  Description of Artificial Sequence:  Hypothetical Probe Sequence
agcccacgcagcggacttga

SEQ ID NO: 9195 - DNA, 20 bp, Artificial Sequence
  Description of Artificial Sequence:  Hypothetical Probe Sequence
agcccacggaccgcttgcaa

SEQ ID NO: 9196 - DNA, 20 bp, Artificial Sequence
  Description of Artificial Sequence:  Hypothetical Probe Sequence
agcccacgacggctcaagga

SEQ ID NO: 9197 - DNA, 20 bp, Artificial Sequence
  Description of Artificial Sequence:  Hypothetical Probe Sequence
cagctgatcctagaccgcaa

SEQ ID NO: 9198 - DNA, 20 bp, Artificial Sequence
  Description of Artificial Sequence:  Hypothetical Probe Sequence
agcccagcttagagtgcagc

SEQ ID NO: 9199 - DNA, 20 bp, Artificial Sequence
  Description of Artificial Sequence:  Hypothetical Probe Sequence
agcccagcaaaggaccagtg

SEQ ID NO: 9200 - DNA, 20 bp, Artificial Sequence
  Description of Artificial Sequence:  Hypothetical Probe Sequence
agcccagctacagatgtccc

SEQ ID NO: 9201 - DNA, 20 bp, Artificial Sequence
  Description of Artificial Sequence:  Hypothetical Probe Sequence
agcccagctcgtgcttgctt

SEQ ID NO: 9202 - DNA, 20 bp, Artificial Sequence
  Description of Artificial Sequence:  Hypothetical Probe Sequence
agcccagcccatttgaagga

SEQ ID NO: 9203 - DNA, 20 bp, Artificial Sequence
  Description of Artificial Sequence:  Hypothetical Probe Sequence
agcccagcgcttacctatcg

SEQ ID NO: 9204 - DNA, 20 bp, Artificial Sequence
  Description of Artificial Sequence:  Hypothetical Probe Sequence
agcccagcgtctataccagc

SEQ ID NO: 9205 - DNA, 20 bp, Artificial Sequence
  Description of Artificial Sequence:  Hypothetical Probe Sequence
agcccagcaggactgttccc

SEQ ID NO: 9206 - DNA, 20 bp, Artificial Sequence
  Description of Artificial Sequence:  Hypothetical Probe Sequence
agcccagcgaccctcaacct

SEQ ID NO: 9207 - DNA, 20 bp, Artificial Sequence
  Description of Artificial Sequence:  Hypothetical Probe Sequence
agcccagcagccccatccta

SEQ ID NO: 9208 - DNA, 20 bp, Artificial Sequence
  Description of Artificial Sequence:  Hypothetical Probe Sequence
agccgaccttgaggtacgaa

SEQ ID NO: 9209 - DNA, 20 bp, Artificial Sequence
  Description of Artificial Sequence:  Hypothetical Probe Sequence
agccgacctgatggacgcaa

SEQ ID NO: 9210 - DNA, 20 bp, Artificial Sequence
  Description of Artificial Sequence:  Hypothetical Probe Sequence
agccgaccaaagcagctccc

SEQ ID NO: 9211 - DNA, 20 bp, Artificial Sequence
  Description of Artificial Sequence:  Hypothetical Probe Sequence
agccgacccttgaaagctgt

SEQ ID NO: 9212 - DNA, 20 bp, Artificial Sequence
  Description of Artificial Sequence:  Hypothetical Probe Sequence
agccgaccctcacctaggac

SEQ ID NO: 9213 - DNA, 20 bp, Artificial Sequence
  Description of Artificial Sequence:  Hypothetical Probe Sequence
agccgaccgtctgatgtccc

SEQ ID NO: 9214 - DNA, 20 bp, Artificial Sequence
  Description of Artificial Sequence:  Hypothetical Probe Sequence
agccgaccgcaactcaaatc

SEQ ID NO: 9215 - DNA, 20 bp, Artificial Sequence
  Description of Artificial Sequence:  Hypothetical Probe Sequence
agccgaccagtgttaggtgc

SEQ ID NO: 9216 - DNA, 20 bp, Artificial Sequence
  Description of Artificial Sequence:  Hypothetical Probe Sequence
agccgaccatcgtctggcaa

SEQ ID NO: 9217 - DNA, 20 bp, Artificial Sequence
  Description of Artificial Sequence:  Hypothetical Probe Sequence
agccgaccaggaagtgcgtt

SEQ ID NO: 9218 - DNA, 20 bp, Artificial Sequence
  Description of Artificial Sequence:  Hypothetical Probe Sequence
agccgacccacgagtgctgt

SEQ ID NO: 9219 - DNA, 20 bp, Artificial Sequence
  Description of Artificial Sequence:  Hypothetical Probe Sequence
agccgaccgtgcatcgaaag

SEQ ID NO: 9220 - DNA, 20 bp, Artificial Sequence
  Description of Artificial Sequence:  Hypothetical Probe Sequence
agccgtgcaatctcgttccc

SEQ ID NO: 9221 - DNA, 20 bp, Artificial Sequence
  Description of Artificial Sequence:  Hypothetical Probe Sequence
agccgtgcataccctacagc

SEQ ID NO: 9222 - DNA, 20 bp, Artificial Sequence
  Description of Artificial Sequence:  Hypothetical Probe Sequence
agccgtgctctgagtgccat

SEQ ID NO: 9223 - DNA, 20 bp, Artificial Sequence
  Description of Artificial Sequence:  Hypothetical Probe Sequence
agccgtgctcgttcgtgtct

SEQ ID NO: 9224 - DNA, 20 bp, Artificial Sequence
  Description of Artificial Sequence:  Hypothetical Probe Sequence
agccgtgccttggagtgcaa

SEQ ID NO: 9225 - DNA, 20 bp, Artificial Sequence
  Description of Artificial Sequence:  Hypothetical Probe Sequence
agccgtgccgaagcaatgtc

SEQ ID NO: 9226 - DNA, 20 bp, Artificial Sequence
  Description of Artificial Sequence:  Hypothetical Probe Sequence
agccgtgcgcttgtgctcgt

SEQ ID NO: 9227 - DNA, 20 bp, Artificial Sequence
  Description of Artificial Sequence:  Hypothetical Probe Sequence
agccgtgcgtctgctttccc

SEQ ID NO: 9228 - DNA, 20 bp, Artificial Sequence
  Description of Artificial Sequence:  Hypothetical Probe Sequence
agccgtgcatcggcaactgt

SEQ ID NO: 9229 - DNA, 20 bp, Artificial Sequence
  Description of Artificial Sequence:  Hypothetical Probe Sequence
agccgtgcggaccttgtcgt

SEQ ID NO: 9230 - DNA, 20 bp, Artificial Sequence
  Description of Artificial Sequence:  Hypothetical Probe Sequence
agccggacttagtacaagcc

SEQ ID NO: 9231 - DNA, 20 bp, Artificial Sequence
  Description of Artificial Sequence:  Hypothetical Probe Sequence
agccggactgtctcgtggta

SEQ ID NO: 9232 - DNA, 20 bp, Artificial Sequence
  Description of Artificial Sequence:  Hypothetical Probe Sequence
agccggaccgtttgtcgacc

SEQ ID NO: 9233 - DNA, 20 bp, Artificial Sequence
  Description of Artificial Sequence:  Hypothetical Probe Sequence
agccggacccatcagcgagt

SEQ ID NO: 9234 - DNA, 20 bp, Artificial Sequence
  Description of Artificial Sequence:  Hypothetical Probe Sequence
agccggacgcttcttgctca

SEQ ID NO: 9235 - DNA, 20 bp, Artificial Sequence
  Description of Artificial Sequence:  Hypothetical Probe Sequence
agccggacacctcttgacct

SEQ ID NO: 9236 - DNA, 20 bp, Artificial Sequence
  Description of Artificial Sequence:  Hypothetical Probe Sequence
agccggacatcgcgtttctg

SEQ ID NO: 9237 - DNA, 20 bp, Artificial Sequence
  Description of Artificial Sequence:  Hypothetical Probe Sequence
agccggacaggacctacagc

SEQ ID NO: 9238 - DNA, 20 bp, Artificial Sequence
  Description of Artificial Sequence:  Hypothetical Probe Sequence
agccggactccctacacacg

SEQ ID NO: 9239 - DNA, 20 bp, Artificial Sequence
  Description of Artificial Sequence:  Hypothetical Probe Sequence
agccggacgtgcgagtgacc

SEQ ID NO: 9240 - DNA, 20 bp, Artificial Sequence
  Description of Artificial Sequence:  Hypothetical Probe Sequence
agccggacggacgacccagc

SEQ ID NO: 9241 - DNA, 20 bp, Artificial Sequence
  Description of Artificial Sequence:  Hypothetical Probe Sequence
agccacggaatctgatgctt

SEQ ID NO: 9242 - DNA, 20 bp, Artificial Sequence
  Description of Artificial Sequence:  Hypothetical Probe Sequence
agccacggataccagctcgt

SEQ ID NO: 9243 - DNA, 20 bp, Artificial Sequence
  Description of Artificial Sequence:  Hypothetical Probe Sequence
agccacggaaagaaaggatg

SEQ ID NO: 9244 - DNA, 20 bp, Artificial Sequence
  Description of Artificial Sequence:  Hypothetical Probe Sequence
agccacggtacacctatccc

SEQ ID NO: 9245 - DNA, 20 bp, Artificial Sequence
  Description of Artificial Sequence:  Hypothetical Probe Sequence
agccacggtctggatgcgtt

SEQ ID NO: 9246 - DNA, 20 bp, Artificial Sequence
  Description of Artificial Sequence:  Hypothetical Probe Sequence
agccacggtgtcggacatcg

SEQ ID NO: 9247 - DNA, 20 bp, Artificial Sequence
  Description of Artificial Sequence:  Hypothetical Probe Sequence
agccacgggcttgcttcacg

SEQ ID NO: 9248 - DNA, 20 bp, Artificial Sequence
  Description of Artificial Sequence:  Hypothetical Probe Sequence
acgggtctgtctgtgccacg

SEQ ID NO: 9249 - DNA, 20 bp, Artificial Sequence
  Description of Artificial Sequence:  Hypothetical Probe Sequence
agccacggatcggctttcgt

SEQ ID NO: 9250 - DNA, 20 bp, Artificial Sequence
  Description of Artificial Sequence:  Hypothetical Probe Sequence
agccacgggaccagtggacc

SEQ ID NO: 9251 - DNA, 20 bp, Artificial Sequence
  Description of Artificial Sequence:  Hypothetical Probe Sequence
acgggtgctacaggacgtgc

SEQ ID NO: 9252 - DNA, 20 bp, Artificial Sequence
  Description of Artificial Sequence:  Hypothetical Probe Sequence
agccacggacggcctaagtg

SEQ ID NO: 9253 - DNA, 20 bp, Artificial Sequence
  Description of Artificial Sequence:  Hypothetical Probe Sequence
agccagcctgatacctagcc

SEQ ID NO: 9254 - DNA, 20 bp, Artificial Sequence
  Description of Artificial Sequence:  Hypothetical Probe Sequence
agccagccaaagacctacgg

SEQ ID NO: 9255 - DNA, 20 bp, Artificial Sequence
  Description of Artificial Sequence:  Hypothetical Probe Sequence
agccagcctctggaccagga

SEQ ID NO: 9256 - DNA, 20 bp, Artificial Sequence
  Description of Artificial Sequence:  Hypothetical Probe Sequence
agccagcctcgtagtgggta

SEQ ID NO: 9257 - DNA, 20 bp, Artificial Sequence
  Description of Artificial Sequence:  Hypothetical Probe Sequence
agccagcccttgtgtccgaa

SEQ ID NO: 9258 - DNA, 20 bp, Artificial Sequence
  Description of Artificial Sequence:  Hypothetical Probe Sequence
agccagcccgttcgtttcgt

SEQ ID NO: 9259 - DNA, 20 bp, Artificial Sequence
  Description of Artificial Sequence:  Hypothetical Probe Sequence
agccagccctcagcttcttg

SEQ ID NO: 9260 - DNA, 20 bp, Artificial Sequence
  Description of Artificial Sequence:  Hypothetical Probe Sequence
agccagccgcttagtgcagc

SEQ ID NO: 9261 - DNA, 20 bp, Artificial Sequence
  Description of Artificial Sequence:  Hypothetical Probe Sequence
agccagccgtctttgaggac

SEQ ID NO: 9262 - DNA, 20 bp, Artificial Sequence
  Description of Artificial Sequence:  Hypothetical Probe Sequence
agccagccatcgtgatgatg

SEQ ID NO: 9263 - DNA, 20 bp, Artificial Sequence
  Description of Artificial Sequence:  Hypothetical Probe Sequence
agccagcctccccagcgatg

SEQ ID NO: 9264 - DNA, 20 bp, Artificial Sequence
  Description of Artificial Sequence:  Hypothetical Probe Sequence
agccagcccacgccatgcaa

SEQ ID NO: 9265 - DNA, 20 bp, Artificial Sequence
  Description of Artificial Sequence:  Hypothetical Probe Sequence
agccagccgacccagcagga

SEQ ID NO: 9266 - DNA, 20 bp, Artificial Sequence
  Description of Artificial Sequence:  Hypothetical Probe Sequence
agccagccggacggtaatcg

SEQ ID NO: 9267 - DNA, 10 bp, Artificial Sequence
  Description of Artificial Sequence:  Hypothetical Probe Sequence
cacacacaca

SEQ ID NO: 9268 - DNA, 24 bp, Artificial Sequence
  Description of Artificial Sequence:  Hypothetical Probe Sequence
tgcgggtacagcacctaccttgcg

SEQ ID NO: 9269 - DNA, 24 bp, Artificial Sequence
  Description of Artificial Sequence:  Hypothetical Probe Sequence
atcgggtaggtaaccttgcgtgcg

SEQ ID NO: 9270 - DNA, 24 bp, Artificial Sequence
  Description of Artificial Sequence:  Hypothetical Probe Sequence
cagcggtagaccacctatcgtgcg

SEQ ID NO: 9271 - DNA, 24 bp, Artificial Sequence
  Description of Artificial Sequence:  Hypothetical Probe Sequence
ggtaggtaacctacctcagctgcg

SEQ ID NO: 9272 - DNA, 24 bp, Artificial Sequence
  Description of Artificial Sequence:  Hypothetical Probe Sequence
gaccggtatgcgacctggtatgcg

SEQ ID NO: 9273 - DNA, 33 bp, Artificial Sequence
  Description of Artificial Sequence:  Consensus Primer Sequence
aaccttatgtgtgacatgttctaatatagtcac

SEQ ID NO: 9274 - DNA, 30 bp, Artificial Sequence
  Description of Artificial Sequence:  Consensus Primer Sequence
aaaatggtcagagaaacctttatctgtatc

SEQ ID NO: 9275 - DNA, 53 bp, Artificial Sequence
  Description of Artificial Sequence:  Consensus Primer Sequence
tatgatccaacaatagaggtaaatcttgtcgcagattttgcgctggatttcaa

SEQ ID NO: 9276 - DNA, 24 bp, Artificial Sequence
  Description of Artificial Sequence:  Consensus Primer Sequence
attcagaatcattttgtggacgaa

SEQ ID NO: 9277 - DNA, 44 bp, Artificial Sequence
  Description of Artificial Sequence:  Consensus Primer Sequence
tggcgtaggcaagagtgcctttcgccgtcgtgtaggcttttcaa

SEQ ID NO: 9278 - DNA, 23 bp, Artificial Sequence
  Description of Artificial Sequence:  Consensus Primer Sequence
aaacttgtggtagttggagctga

SEQ ID NO: 9279 - DNA, 23 bp, Artificial Sequence
  Description of Artificial Sequence:  Consensus Primer Sequence
aaacttgtggtagttggagctgc

SEQ ID NO: 9280 - DNA, 23 bp, Artificial Sequence
  Description of Artificial Sequence:  Consensus Primer Sequence
aaacttgtggtagttggagctgt

SEQ ID NO: 9281 - DNA, 44 bp, Artificial Sequence
  Description of Artificial Sequence:  Consensus Primer Sequence
gtggcgtaggcaagagtgccccgtaagcccgtatggcagatcaa

SEQ ID NO: 9282 - DNA, 26 bp, Artificial Sequence
  Description of Artificial Sequence:  Consensus Primer Sequence
atataaacttgtggtagttggagcta

SEQ ID NO: 9283 - DNA, 26 bp, Artificial Sequence
  Description of Artificial Sequence:  Consensus Primer Sequence
atataaacttgtggtagttggagctc

SEQ ID NO: 9284 - DNA, 26 bp, Artificial Sequence
  Description of Artificial Sequence:  Consensus Primer Sequence
atataaacttgtggtagttggagctt

SEQ ID NO: 9285 - DNA, 45 bp, Artificial Sequence
  Description of Artificial Sequence:  Consensus Primer Sequence
cgtaggcaagagtgccttgacatggccgtgctggggacaagtcaa

SEQ ID NO: 9286 - DNA, 21 bp, Artificial Sequence
  Description of Artificial Sequence:  Consensus Primer Sequence
tgtggtagttggagctggtga

SEQ ID NO: 9287 - DNA, 22 bp, Artificial Sequence
  Description of Artificial Sequence:  Consensus Primer Sequence
ggagcacgctatcccgttagac

SEQ ID NO: 9288 - DNA, 21 bp, Artificial Sequence
  Description of Artificial Sequence:  Consensus Primer Sequence
cgctgccaactaccgcacatg

SEQ ID NO: 9289 - DNA, 29 bp, Artificial Sequence
  Description of Artificial Sequence:  Consensus Primer Sequence
tcattggaacagaaagaaatggatttatc

SEQ ID NO: 9290 - DNA, 31 bp, Artificial Sequence
  Description of Artificial Sequence:  Consensus Primer Sequence
tcttccctagtatgtaaggtcaattctgttc

SEQ ID NO: 9291 - DNA, 27 bp, Artificial Sequence
  Description of Artificial Sequence:  Consensus Primer Sequence
acttccattgaaggaagcttctctttc

SEQ ID NO: 9292 - DNA, 25 bp, Artificial Sequence
  Description of Artificial Sequence:  Consensus Primer Sequence
atctctgcaaaggggagtggaatac

SEQ ID NO: 9293 - DNA, 29 bp, Artificial Sequence
  Description of Artificial Sequence:  Consensus Primer Sequence
caaaatatgtctggattggagaaagtttc

SEQ ID NO: 9294 - DNA, 29 bp, Artificial Sequence
  Description of Artificial Sequence:  Consensus Primer Sequence
ttggaaaagacttgcttggtactatcttc

SEQ ID NO: 9295 - DNA, 30 bp, Artificial Sequence
  Description of Artificial Sequence:  Hypothetical Probe Sequence
aacattaatgctatgcagaaaatcttagag

SEQ ID NO: 9296 - DNA, 28 bp, Artificial Sequence
  Description of Artificial Sequence:  Hypothetical Probe Sequence
gtcattaatgctatgcagaaaatcttag

SEQ ID NO: 9297 - DNA, 21 bp, Artificial Sequence
  Description of Artificial Sequence:  Hypothetical Probe Sequence
ccaaagcgagcaagagaatcc

SEQ ID NO: 9298 - DNA, 23 bp, Artificial Sequence
  Description of Artificial Sequence:  Hypothetical Probe Sequence
aacaaagcgagcaagagaatccc

SEQ ID NO: 9299 - DNA, 16 bp, Artificial Sequence
  Description of Artificial Sequence:  Hypothetical Probe Sequence
ttttagcacagcaagt

SEQ ID NO: 9300 - DNA, 27 bp, Artificial Sequence
  Description of Artificial Sequence:  Hypothetical Probe Sequence
tacttgtgggatttttagcacagcaag

SEQ ID NO: 9301 - DNA, 27 bp, Artificial Sequence
  Description of Artificial Sequence:  Hypothetical Probe Sequence
tgtcccatctggtaagtcagcacaaac

SEQ ID NO: 9302 - DNA, 25 bp, Artificial Sequence
  Description of Artificial Sequence:  Hypothetical Probe Sequence
caggacagaaaggtaaagctccctc

SEQ ID NO: 9303 - DNA, 24 bp, Artificial Sequence
  Description of Artificial Sequence:  Hypothetical Probe Sequence
ggaaaatctgtccaggtatcagat

SEQ ID NO: 9304 - DNA, 26 bp, Artificial Sequence
  Description of Artificial Sequence:  Hypothetical Probe Sequence
tgcataggagataatcataggaatcc

SEQ ID NO: 9305 - DNA, 28 bp, Artificial Sequence
  Description of Artificial Sequence:  Hypothetical Probe Sequence
gtcattaatgctatgcagaaaatcttag

SEQ ID NO: 9306 - DNA, 23 bp, Artificial Sequence
  Description of Artificial Sequence:  Hypothetical Probe Sequence
cctctgacttcaaaatcatgctg

SEQ ID NO: 9307 - DNA, 21 bp, Artificial Sequence
  Description of Artificial Sequence:  Hypothetical Probe Sequence
caaagcgagcaagagaatccc

SEQ ID NO: 9308 - DNA, 32 bp, Artificial Sequence
  Description of Artificial Sequence:  Hypothetical Probe Sequence
cttccctatactacatttacatatatctgaag

SEQ ID NO: 9309 - DNA, 27 bp, Artificial Sequence
  Description of Artificial Sequence:  Hypothetical Probe Sequence
tacttgtgggatttttagcacagcaag

SEQ ID NO: 9310 - DNA, 55 bp, Artificial Sequence
  Description of Artificial Sequence:  Hypothetical Probe Sequence
caaattaatacactcttgtgctgacttaccacgcagattttgcgctggatttcaa

SEQ ID NO: 9311 - DNA, 49 bp, Artificial Sequence
  Description of Artificial Sequence:  Hypothetical Probe Sequence
aaagaaaccaaacacaacccatcagttcgccgtcgtgtaggcttttcaa

SEQ ID NO: 9312 - DNA, 54 bp, Artificial Sequence
  Description of Artificial Sequence:  Hypothetical Probe Sequence
tttccaaactaacatcacaaggtgatatttccgtaagcccgtatggcagatcaa

SEQ ID NO: 9313 - DNA, 51 bp, Artificial Sequence
  Description of Artificial Sequence:  Hypothetical Probe Sequence
tgtcccatctggtaagtcagcacaaaccatcgtccctttcgatgggatcaa

SEQ ID NO: 9314 - DNA, 49 bp, Artificial Sequence
  Description of Artificial Sequence:  Hypothetical Probe Sequence
caggacagaaaggtaaagctccctccaaggcacgtcccagacgcatcaa

SEQ ID NO: 9315 - DNA, 48 bp, Artificial Sequence
  Description of Artificial Sequence:  Hypothetical Probe Sequence
ggaaaatctgtccaggtatcagatgcacgggagctgacgacgtgtcaa

SEQ ID NO: 9316 - DNA, 22 bp, Artificial Sequence
  Description of Artificial Sequence:  Consensus Primer Sequence
ggagcacgctatcccgttagac

SEQ ID NO: 9317 - DNA, 21 bp, Artificial Sequence
  Description of Artificial Sequence:  Consensus Primer Sequence
cgctgccaactaccgcacatc

SEQ ID NO: 9318 - DNA, 46 bp, Artificial Sequence
  Description of Artificial Sequence:  Hypothetical Probe Sequence
ggagcacgctatcccgttagacctgttcacttgtgccctgactttc

SEQ ID NO: 9319 - DNA, 43 bp, Artificial Sequence
  Description of Artificial Sequence:  Hypothetical Probe Sequence
cgctgccaactaccgcacatcccagctgctcaccatcgctatc

SEQ ID NO: 9320 - DNA, 22 bp, Artificial Sequence
  Description of Artificial Sequence:  Hypothetical Probe Sequence
aaagccagttggcaaaacatcc

SEQ ID NO: 9321 - DNA, 19 bp, Artificial Sequence
  Description of Artificial Sequence:  Hypothetical Probe Sequence
gccagttggcaaaacatcc

SEQ ID NO: 9322 - DNA, 27 bp, Artificial Sequence
  Description of Artificial Sequence:  Hypothetical Probe Sequence
tgttgagggcaggggagtactgtaaaa

SEQ ID NO: 9323 - DNA, 48 bp, Artificial Sequence
  Description of Artificial Sequence:  Hypothetical Probe Sequence
tgttgagggcaggggagtactgtacatcgtccctttcgatgggatcaa

SEQ ID NO: 9324 - DNA, 22 bp, Artificial Sequence
  Description of Artificial Sequence:  Hypothetical Probe Sequence
ctgccctcaacaagatgtttta

SEQ ID NO: 9325 - DNA, 22 bp, Artificial Sequence
  Description of Artificial Sequence:  Hypothetical Probe Sequence
ctgccctcaacaagatgtttta

SEQ ID NO: 9326 - DNA, 24 bp, Artificial Sequence
  Description of Artificial Sequence:  Hypothetical Probe Sequence
ccaactggccaagacctgccaaaa

SEQ ID NO: 9327 - DNA, 22 bp, Artificial Sequence
  Description of Artificial Sequence:  Hypothetical Probe Sequence
ctgccctcaacaagatgttttt

SEQ ID NO: 9328 - DNA, 22 bp, Artificial Sequence
  Description of Artificial Sequence:  Hypothetical Probe Sequence
ctgccctcaacaagatgttttt

SEQ ID NO: 9329 - DNA, 44 bp, Artificial Sequence
  Description of Artificial Sequence:  Hypothetical Probe Sequence
ccaactggccaagacctgcccaaggcacgtcccagacgcatcaa

SEQ ID NO: 9330 - DNA, 19 bp, Artificial Sequence
  Description of Artificial Sequence:  Hypothetical Probe Sequence
gccaactggccaagaccta

SEQ ID NO: 9331 - DNA, 19 bp, Artificial Sequence
  Description of Artificial Sequence:  Hypothetical Probe Sequence
gccaactggccaagaccta

SEQ ID NO: 9332 - DNA, 26 bp, Artificial Sequence
  Description of Artificial Sequence:  Hypothetical Probe Sequence
ccctgtgcagctgtgggttgaaaaaa

SEQ ID NO: 9333 - DNA, 45 bp, Artificial Sequence
  Description of Artificial Sequence:  Hypothetical Probe Sequence
ccctgtgcagctgtgggttgagcacgggagctgacgacgtgtcaa

SEQ ID NO: 9334 - DNA, 18 bp, Artificial Sequence
  Description of Artificial Sequence:  Hypothetical Probe Sequence
tggccaagacctgcccta

SEQ ID NO: 9335 - DNA, 18 bp, Artificial Sequence
  Description of Artificial Sequence:  Hypothetical Probe Sequence
tggccaagacctgcccta

SEQ ID NO: 9336 - DNA, 24 bp, Artificial Sequence
  Description of Artificial Sequence:  Hypothetical Probe Sequence
tgcagctgtgggttgattccaaaa

SEQ ID NO: 9337 - DNA, 45 bp, Artificial Sequence
  Description of Artificial Sequence:  Hypothetical Probe Sequence
tgcagctgtgggttgattccaagacgcaccgcaacaggctgtcaa

SEQ ID NO: 9338 - DNA, 16 bp, Artificial Sequence
  Description of Artificial Sequence:  Hypothetical Probe Sequence
ccaagacctgccctgc

SEQ ID NO: 9339 - DNA, 16 bp, Artificial Sequence
  Description of Artificial Sequence:  Hypothetical Probe Sequence
ccaagacctgccctgc

SEQ ID NO: 9340 - DNA, 26 bp, Artificial Sequence
  Description of Artificial Sequence:  Hypothetical Probe Sequence
gcagctgtgggttgattccacaaaaa

SEQ ID NO: 9341 - DNA, 46 bp, Artificial Sequence
  Description of Artificial Sequence:  Hypothetical Probe Sequence
gcagctgtgggttgattccacacatcgctgcaagtaccgcactcaa

SEQ ID NO: 9342 - DNA, 18 bp, Artificial Sequence
  Description of Artificial Sequence:  Hypothetical Probe Sequence
tgccctgtgcagctgtga

SEQ ID NO: 9343 - DNA, 44 bp, Artificial Sequence
  Description of Artificial Sequence:  Hypothetical Probe Sequence
gttgattccacacccccgcccgatggcttccttacccagattcg

SEQ ID NO: 9344 - DNA, 13 bp, Artificial Sequence
  Description of Artificial Sequence:  Hypothetical Probe Sequence
cgggtgccgggca

SEQ ID NO: 9345 - DNA, 27 bp, Artificial Sequence
  Description of Artificial Sequence:  Hypothetical Probe Sequence
ggggtgtggaatcaacccacaaaaaaa

SEQ ID NO: 9346 - DNA, 45 bp, Artificial Sequence
  Description of Artificial Sequence:  Hypothetical Probe Sequence
ggggtgtggaatcaacccacaggctgggacgtgcagaccgttcaa

SEQ ID NO: 9347 - DNA, 20 bp, Artificial Sequence
  Description of Artificial Sequence:  Hypothetical Probe Sequence
atataacacacccccgccca

SEQ ID NO: 9348 - DNA, 14 bp, Artificial Sequence
  Description of Artificial Sequence:  Hypothetical Probe Sequence
cacacccccgccca

SEQ ID NO: 9349 - DNA, 21 bp, Artificial Sequence
  Description of Artificial Sequence:  Hypothetical Probe Sequence
gcacccgcgtccgcgatataa

SEQ ID NO: 9350 - DNA, 39 bp, Artificial Sequence
  Description of Artificial Sequence:  Hypothetical Probe Sequence
gcacccgcgtccgcggctggctggcacgcaccagaatca

SEQ ID NO: 9351 - DNA, 14 bp, Artificial Sequence
  Description of Artificial Sequence:  Hypothetical Probe Sequence
gccatggcgcggag

SEQ ID NO: 9352 - DNA, 17 bp, Artificial Sequence
  Description of Artificial Sequence:  Hypothetical Probe Sequence
gcgggtgccgggcgaaa

SEQ ID NO: 9353 - DNA, 14 bp, Artificial Sequence
  Description of Artificial Sequence:  Hypothetical Probe Sequence
gccatggcgcggaa

SEQ ID NO: 9354 - DNA, 38 bp, Artificial Sequence
  Description of Artificial Sequence:  Hypothetical Probe Sequence
gcgggtgccgggcgggctccgtcagaaagcgacaatca

SEQ ID NO: 9355 - DNA, 15 bp, Artificial Sequence
  Description of Artificial Sequence:  Hypothetical Probe Sequence
gatggccatggcgct

SEQ ID NO: 9356 - DNA, 39 bp, Artificial Sequence
  Description of Artificial Sequence:  Hypothetical Probe Sequence
gacgcgggtgccgggacgagggatacccgcaaacgatca

SEQ ID NO: 9357 - DNA, 15 bp, Artificial Sequence
  Description of Artificial Sequence:  Hypothetical Probe Sequence
cggcacccgcgtcca

SEQ ID NO: 9358 - DNA, 20 bp, Artificial Sequence
  Description of Artificial Sequence:  Hypothetical Probe Sequence
cgccatggccatctacaagc

SEQ ID NO: 9359 - DNA, 44 bp, Artificial Sequence
  Description of Artificial Sequence:  Hypothetical Probe Sequence
cgccatggccatctacaagcacgagggatacccgcaaacgatca

SEQ ID NO: 9360 - DNA, 23 bp, Artificial Sequence
  Description of Artificial Sequence:  Hypothetical Probe Sequence
gtgctgtgactgcttgtagatga

SEQ ID NO: 9361 - DNA, 39 bp, Artificial Sequence
  Description of Artificial Sequence:  Hypothetical Probe Sequence
ccatggcgcggacgcgggaggctgctgtcctttcgatca

SEQ ID NO: 9362 - DNA, 23 bp, Artificial Sequence
  Description of Artificial Sequence:  Hypothetical Probe Sequence
aaaaaaaagcgtccgcgccatga

SEQ ID NO: 9363 - DNA, 15 bp, Artificial Sequence
  Description of Artificial Sequence:  Hypothetical Probe Sequence
gcgtccgcgccatga

SEQ ID NO: 9364 - DNA, 32 bp, Artificial Sequence
  Description of Artificial Sequence:  Hypothetical Probe Sequence
ccatctacaagcagtcacagcacaaaaaaaaa

SEQ ID NO: 9365 - DNA, 48 bp, Artificial Sequence
  Description of Artificial Sequence:  Hypothetical Probe Sequence
ccatctacaagcagtcacagcacagggaggctgctgtcctttcgatca

SEQ ID NO: 9366 - DNA, 21 bp, Artificial Sequence
  Description of Artificial Sequence:  Hypothetical Probe Sequence
cacagcacatgacggaggtta

SEQ ID NO: 9367 - DNA, 21 bp, Artificial Sequence
  Description of Artificial Sequence:  Hypothetical Probe Sequence
tgaggcgctgcccccaaaaaa

SEQ ID NO: 9368 - DNA, 21 bp, Artificial Sequence
  Description of Artificial Sequence:  Hypothetical Probe Sequence
cacagcacatgacggaggttt

SEQ ID NO: 9369 - DNA, 40 bp, Artificial Sequence
  Description of Artificial Sequence:  Hypothetical Probe Sequence
tgaggcgctgcccccaacagcgtgttcgttgcttgcatca

SEQ ID NO: 9370 - DNA, 23 bp, Artificial Sequence
  Description of Artificial Sequence:  Hypothetical Probe Sequence
cctcacaacctccgtcatgtgct

SEQ ID NO: 9371 - DNA, 16 bp, Artificial Sequence
  Description of Artificial Sequence:  Hypothetical Probe Sequence
catggtgggggcagca

SEQ ID NO: 9372 - DNA, 47 bp, Artificial Sequence
  Description of Artificial Sequence:  Hypothetical Probe Sequence
cctcacaacctccgtcatgtgctatggcgatggtccactcgcaatca

SEQ ID NO: 9373 - DNA, 17 bp, Artificial Sequence
  Description of Artificial Sequence:  Hypothetical Probe Sequence
ctcatggtgggggcagt

SEQ ID NO: 9374 - DNA, 22 bp, Artificial Sequence
  Description of Artificial Sequence:  Hypothetical Probe Sequence
gcctcacaacctccgtcatgtg

SEQ ID NO: 9375 - DNA, 46 bp, Artificial Sequence
  Description of Artificial Sequence:  Hypothetical Probe Sequence
gcctcacaacctccgtcatgtggtccgtccatggcaagcgtgatca

SEQ ID NO: 9376 - DNA, 19 bp, Artificial Sequence
  Description of Artificial Sequence:  Hypothetical Probe Sequence
tgacggaggttgtgaggca

SEQ ID NO: 9377 - DNA, 24 bp, Artificial Sequence
  Description of Artificial Sequence:  Hypothetical Probe Sequence
ctgcccccaccatgagcgaaaaaa

SEQ ID NO: 9378 - DNA, 42 bp, Artificial Sequence
  Description of Artificial Sequence:  Hypothetical Probe Sequence
ctgcccccaccatgagcggtccgtccatggcaagcgtgatca

SEQ ID NO: 9379 - DNA, 19 bp, Artificial Sequence
  Description of Artificial Sequence:  Hypothetical Probe Sequence
cggaggttgtgaggcgcta

SEQ ID NO: 9380 - DNA, 25 bp, Artificial Sequence
  Description of Artificial Sequence:  Hypothetical Probe Sequence
cccccaccatgagcgctgaaaaaaa

SEQ ID NO: 9381 - DNA, 19 bp, Artificial Sequence
  Description of Artificial Sequence:  Hypothetical Probe Sequence
cggaggttgtgaggcgctt

SEQ ID NO: 9382 - DNA, 42 bp, Artificial Sequence
  Description of Artificial Sequence:  Hypothetical Probe Sequence
cccccaccatgagcgctgggctgcacccgttgaggcacatca

SEQ ID NO: 9383 - DNA, 15 bp, Artificial Sequence
  Description of Artificial Sequence:  Hypothetical Probe Sequence
ggtgggggcagcgcc

SEQ ID NO: 9384 - DNA, 20 bp, Artificial Sequence
  Description of Artificial Sequence:  Hypothetical Probe Sequence
gctatctgagcagcgctcac

SEQ ID NO: 9385 - DNA, 20 bp, Artificial Sequence
  Description of Artificial Sequence:  Hypothetical Probe Sequence
gctatctgagcagcgctcaa

SEQ ID NO: 9386 - DNA, 39 bp, Artificial Sequence
  Description of Artificial Sequence:  Hypothetical Probe Sequence
ggtgggggcagcgcctcaacatcggctaacggtccatca

SEQ ID NO: 9387 - DNA, 21 bp, Artificial Sequence
  Description of Artificial Sequence:  Hypothetical Probe Sequence
gctatctgagcagcgctcata

SEQ ID NO: 9388 - DNA, 18 bp, Artificial Sequence
  Description of Artificial Sequence:  Hypothetical Probe Sequence
gtgggggcagcgcctcac

SEQ ID NO: 9389 - DNA, 42 bp, Artificial Sequence
  Description of Artificial Sequence:  Hypothetical Probe Sequence
gtgggggcagcgcctcaccgcacgcagtcctcctccgtatca

SEQ ID NO: 9390 - DNA, 20 bp, Artificial Sequence
  Description of Artificial Sequence:  Hypothetical Probe Sequence
cgggggtgtggaatcaaccc

SEQ ID NO: 9391 - DNA, 13 bp, Artificial Sequence
  Description of Artificial Sequence:  Hypothetical Probe Sequence
cgcgggtgccggg

SEQ ID NO: 9392 - DNA, 44 bp, Artificial Sequence
  Description of Artificial Sequence:  Hypothetical Probe Sequence
cgggggtgtggaatcaaccccgcagattttgcgctggatttcaa

SEQ ID NO: 9393 - DNA, 49 bp, Artificial Sequence
  Description of Artificial Sequence:  Hypothetical Probe Sequence
ggagcacgctatcccgttagaccctctgattcctcactgattgctctta

SEQ ID NO: 9394 - DNA, 44 bp, Artificial Sequence
  Description of Artificial Sequence:  Hypothetical Probe Sequence
cgctgccaactaccgcacatcggccactgacaaccacccttaac

SEQ ID NO: 9395 - DNA, 25 bp, Artificial Sequence
  Description of Artificial Sequence:  Hypothetical Probe Sequence
aaaatcggataagatgctgaggaga

SEQ ID NO: 9396 - DNA, 21 bp, Artificial Sequence
  Description of Artificial Sequence:  Hypothetical Probe Sequence
tcggataagatgctgaggaga

SEQ ID NO: 9397 - DNA, 27 bp, Artificial Sequence
  Description of Artificial Sequence:  Hypothetical Probe Sequence
ggccagaccctaagagcaatcagaaaa

SEQ ID NO: 9398 - DNA, 47 bp, Artificial Sequence
  Description of Artificial Sequence:  Hypothetical Probe Sequence
ggccagaccctaagagcaatcagggctcgcaggctggctcatcctaa

SEQ ID NO: 9399 - DNA, 22 bp, Artificial Sequence
  Description of Artificial Sequence:  Hypothetical Probe Sequence
cactcggataagatgctgaggt

SEQ ID NO: 9400 - DNA, 45 bp, Artificial Sequence
  Description of Artificial Sequence:  Hypothetical Probe Sequence
ggggccagaccctaagagcaaggctcgcaggctggctcatcctaa

SEQ ID NO: 9401 - DNA, 24 bp, Artificial Sequence
  Description of Artificial Sequence:  Hypothetical Probe Sequence
aatttccttccactcggataagac

SEQ ID NO: 9402 - DNA, 43 bp, Artificial Sequence
  Description of Artificial Sequence:  Hypothetical Probe Sequence
gctgaggaggggccagacccgcattcgatggacaggacattcg

SEQ ID NO: 9403 - DNA, 23 bp, Artificial Sequence
  Description of Artificial Sequence:  Hypothetical Probe Sequence
aatttccttccactcggataagt

SEQ ID NO: 9404 - DNA, 43 bp, Artificial Sequence
  Description of Artificial Sequence:  Hypothetical Probe Sequence
tgctgaggaggggccagaccgcattcgatggacaggacattcg

SEQ ID NO: 9405 - DNA, 23 bp, Artificial Sequence
  Description of Artificial Sequence:  Hypothetical Probe Sequence
gataagatgctgaggaggggcca

SEQ ID NO: 9406 - DNA, 20 bp, Artificial Sequence
  Description of Artificial Sequence:  Hypothetical Probe Sequence
cgcaaatttccttccactca

SEQ ID NO: 9407 - DNA, 47 bp, Artificial Sequence
  Description of Artificial Sequence:  Hypothetical Probe Sequence
gataagatgctgaggaggggccacgcatgaggggaaacgacgagatt

SEQ ID NO: 9408 - DNA, 23 bp, Artificial Sequence
  Description of Artificial Sequence:  Hypothetical Probe Sequence
aaaagtgtttctgtcatccaaag

SEQ ID NO: 9409 - DNA, 30 bp, Artificial Sequence
  Description of Artificial Sequence:  Hypothetical Probe Sequence
actccacacgcaaatttccttccaaaaaaa

SEQ ID NO: 9410 - DNA, 23 bp, Artificial Sequence
  Description of Artificial Sequence:  Hypothetical Probe Sequence
aaaagtgtttctgtcatccaaac

SEQ ID NO: 9411 - DNA, 48 bp, Artificial Sequence
  Description of Artificial Sequence:  Hypothetical Probe Sequence
actccacacgcaaatttccttccagcaccgtgaacgacagttgcgatt

SEQ ID NO: 9412 - DNA, 22 bp, Artificial Sequence
  Description of Artificial Sequence:  Hypothetical Probe Sequence
ccaccacactatgtcgaaaagc

SEQ ID NO: 9413 - DNA, 30 bp, Artificial Sequence
  Description of Artificial Sequence:  Hypothetical Probe Sequence
gtttctgtcatccaaatactccacacgaaa

SEQ ID NO: 9414 - DNA, 51 bp, Artificial Sequence
  Description of Artificial Sequence:  Hypothetical Probe Sequence
gtttctgtcatccaaatactccacacgcgcaggtcgctgcgtgtcctgatt

SEQ ID NO: 9415 - DNA, 22 bp, Artificial Sequence
  Description of Artificial Sequence:  Hypothetical Probe Sequence
accaccacactatgtcgaaaaa

SEQ ID NO: 9416 - DNA, 30 bp, Artificial Sequence
  Description of Artificial Sequence:  Hypothetical Probe Sequence
tgtttctgtcatccaaatactccacacaaa

SEQ ID NO: 9417 - DNA, 51 bp, Artificial Sequence
  Description of Artificial Sequence:  Hypothetical Probe Sequence
tgtttctgtcatccaaatactccacaccgcaaagcagacacagggtcgatt

SEQ ID NO: 9418 - DNA, 29 bp, Artificial Sequence
  Description of Artificial Sequence:  Hypothetical Probe Sequence
aaaagtgtttctgtcatccaaatactcca

SEQ ID NO: 9419 - DNA, 21 bp, Artificial Sequence
  Description of Artificial Sequence:  Hypothetical Probe Sequence
gggcaccaccacactatgtca

SEQ ID NO: 9420 - DNA, 52 bp, Artificial Sequence
  Description of Artificial Sequence:  Hypothetical Probe Sequence
aaaagtgtttctgtcatccaaatactcccatcgcacttcgctttggctgatt

SEQ ID NO: 9421 - DNA, 23 bp, Artificial Sequence
  Description of Artificial Sequence:  Hypothetical Probe Sequence
agggcaccaccacactatgtcga

SEQ ID NO: 9422 - DNA, 19 bp, Artificial Sequence
  Description of Artificial Sequence:  Hypothetical Probe Sequence
cagacctcaggcggctcac

SEQ ID NO: 9423 - DNA, 47 bp, Artificial Sequence
  Description of Artificial Sequence:  Hypothetical Probe Sequence
agggcaccaccacactatgtcgattgcgggaactcacgaggtcgtat

SEQ ID NO: 9424 - DNA, 25 bp, Artificial Sequence
  Description of Artificial Sequence:  Hypothetical Probe Sequence
cctatgagccgcctgaggtctaaaa

SEQ ID NO: 9425 - DNA, 24 bp, Artificial Sequence
  Description of Artificial Sequence:  Hypothetical Probe Sequence
aaattcgacatagtgtggtggtgc

SEQ ID NO: 9426 - DNA, 45 bp, Artificial Sequence
  Description of Artificial Sequence:  Hypothetical Probe Sequence
cctatgagccgcctgaggtctttcgccgtcgtgtaggcttttcaa

SEQ ID NO: 9427 - DNA, 46 bp, Artificial Sequence
  Description of Artificial Sequence:  Hypothetical Probe Sequence
ggagcacgctatcccgttagacgcctcatcttgggcctgtgttatc

SEQ ID NO: 9428 - DNA, 49 bp, Artificial Sequence
  Description of Artificial Sequence:  Hypothetical Probe Sequence
cgctgccaactaccgcacatcgtggatgggtagtagtatggaagaaatc

SEQ ID NO: 9429 - DNA, 23 bp, Artificial Sequence
  Description of Artificial Sequence:  Hypothetical Probe Sequence
ctctgactgtaccaccatccaca

SEQ ID NO: 9430 - DNA, 52 bp, Artificial Sequence
  Description of Artificial Sequence:  Hypothetical Probe Sequence
acaactacatgtgtaacagttcctgcatggctacgacgcatgtaaacgttcg

SEQ ID NO: 9431 - DNA, 34 bp, Artificial Sequence
  Description of Artificial Sequence:  Hypothetical Probe Sequence
aaaaataagtaccaccatccactacaactacata

SEQ ID NO: 9432 - DNA, 30 bp, Artificial Sequence
  Description of Artificial Sequence:  Hypothetical Probe Sequence
ataagtaccaccatccactacaactacata

SEQ ID NO: 9433 - DNA, 26 bp, Artificial Sequence
  Description of Artificial Sequence:  Hypothetical Probe Sequence
tgtaacagttcctgcatgggcgaaaa

SEQ ID NO: 9434 - DNA, 34 bp, Artificial Sequence
  Description of Artificial Sequence:  Hypothetical Probe Sequence
aaaaataagtaccaccatccactacaactacatt

SEQ ID NO: 9435 - DNA, 30 bp, Artificial Sequence
  Description of Artificial Sequence:  Hypothetical Probe Sequence
ataagtaccaccatccactacaactacatt

SEQ ID NO: 9436 - DNA, 46 bp, Artificial Sequence
  Description of Artificial Sequence:  Hypothetical Probe Sequence
tgtaacagttcctgcatgggcggcacggctcgataggtcaagcttt

SEQ ID NO: 9437 - DNA, 25 bp, Artificial Sequence
  Description of Artificial Sequence:  Hypothetical Probe Sequence
ccaccatccactacaactacatgta

SEQ ID NO: 9438 - DNA, 26 bp, Artificial Sequence
  Description of Artificial Sequence:  Hypothetical Probe Sequence
taacagttcctgcatgggcggaaaaa

SEQ ID NO: 9439 - DNA, 45 bp, Artificial Sequence
  Description of Artificial Sequence:  Hypothetical Probe Sequence
taacagttcctgcatgggcggcgatttcgactcaagcggctcttt

SEQ ID NO: 9440 - DNA, 16 bp, Artificial Sequence
  Description of Artificial Sequence:  Hypothetical Probe Sequence
atgccgcccatgcagt

SEQ ID NO: 9441 - DNA, 55 bp, Artificial Sequence
  Description of Artificial Sequence:  Hypothetical Probe Sequence
aactgttacacatgtagttgtagtggatggtcgcaatggtaggtgagcaagcaga

SEQ ID NO: 9442 - DNA, 34 bp, Artificial Sequence
  Description of Artificial Sequence:  Hypothetical Probe Sequence
aactgttacacatgtagttgtagtggatggtaaa

SEQ ID NO: 9443 - DNA, 15 bp, Artificial Sequence
  Description of Artificial Sequence:  Hypothetical Probe Sequence
tgccgcccatgcagc

SEQ ID NO: 9444 - DNA, 15 bp, Artificial Sequence
  Description of Artificial Sequence:  Hypothetical Probe Sequence
tgccgcccatgcaga

SEQ ID NO: 9445 - DNA, 55 bp, Artificial Sequence; identical to SEQ ID NO: 9441
  Description of Artificial Sequence:  Hypothetical Probe Sequence

SEQ ID NO: 9446 - DNA, 28 bp, Artificial Sequence
  Description of Artificial Sequence:  Hypothetical Probe Sequence
aaaaacatgtgtaacagttcctgcatgt

SEQ ID NO: 9447 - DNA, 23 bp, Artificial Sequence
  Description of Artificial Sequence:  Hypothetical Probe Sequence
catgtgtaacagttcctgcatgt

SEQ ID NO: 9448 - DNA, 24 bp, Artificial Sequence
  Description of Artificial Sequence:  Hypothetical Probe Sequence
gcggcatgaaccggaggcaaaaaa

SEQ ID NO: 9449 - DNA, 42 bp, Artificial Sequence
  Description of Artificial Sequence:  Hypothetical Probe Sequence
gcggcatgaaccggaggcgtccccgttacctaggcgatcaga

SEQ ID NO: 9450 - DNA, 28 bp, Artificial Sequence
  Description of Artificial Sequence:  Hypothetical Probe Sequence
aaaaaatgtgtaacagttcctgcatgga

SEQ ID NO: 9451 - DNA, 22 bp, Artificial Sequence
  Description of Artificial Sequence:  Hypothetical Probe Sequence
tgtgtaacagttcctgcatgga

SEQ ID NO: 9452 - DNA, 24 bp, Artificial Sequence
  Description of Artificial Sequence:  Hypothetical Probe Sequence
cggcatgaaccggaggccaaaaaa

SEQ ID NO: 9453 - DNA, 28 bp, Artificial Sequence
  Description of Artificial Sequence:  Hypothetical Probe Sequence
aaaaaatgtgtaacagttcctgcatggt

SEQ ID NO: 9454 - DNA, 22 bp, Artificial Sequence
  Description of Artificial Sequence:  Hypothetical Probe Sequence
tgtgtaacagttcctgcatggt

SEQ ID NO: 9455 - DNA, 42 bp, Artificial Sequence
  Description of Artificial Sequence:  Hypothetical Probe Sequence
cggcatgaaccggaggccatgggtccacagtaccgctgcaga

SEQ ID NO: 9456 - DNA, 19 bp, Artificial Sequence
  Description of Artificial Sequence:  Hypothetical Probe Sequence
aacagttcctgcatgggca

SEQ ID NO: 9457 - DNA, 22 bp, Artificial Sequence
  Description of Artificial Sequence:  Hypothetical Probe Sequence
gcatgaaccggaggcccaaaaa

SEQ ID NO: 9458 - DNA, 42 bp, Artificial Sequence
  Description of Artificial Sequence:  Hypothetical Probe Sequence
gcatgaaccggaggcccaccgtgggagattaggtggctcaga

SEQ ID NO: 9459 - DNA, 18 bp, Artificial Sequence
  Description of Artificial Sequence:  Hypothetical Probe Sequence
cagttcctgcatgggcga

SEQ ID NO: 9460 - DNA, 22 bp, Artificial Sequence
  Description of Artificial Sequence:  Hypothetical Probe Sequence
catgaaccggaggcccatcaaa

SEQ ID NO: 9461 - DNA, 43 bp, Artificial Sequence
  Description of Artificial Sequence:  Hypothetical Probe Sequence
catgaaccggaggcccatcgggaatggaggtgggaacgagaca

SEQ ID NO: 9462 - DNA, 25 bp, Artificial Sequence
  Description of Artificial Sequence:  Hypothetical Probe Sequence
aaaaaaaaagttcctgcatgggcga

SEQ ID NO: 9463 - DNA, 18 bp, Artificial Sequence
  Description of Artificial Sequence:  Hypothetical Probe Sequence
cagttcctgcatgggcgt

SEQ ID NO: 9464 - DNA, 28 bp, Artificial Sequence
  Description of Artificial Sequence:  Hypothetical Probe Sequence
catgaaccggaggcccatcaaaaaaaaa

SEQ ID NO: 9465 - DNA, 20 bp, Artificial Sequence
  Description of Artificial Sequence:  Hypothetical Probe Sequence
gttcatgccgcccatgcaaa

SEQ ID NO: 9466 - DNA, 18 bp, Artificial Sequence
  Description of Artificial Sequence:  Hypothetical Probe Sequence
ggtgaggatgggcctcca

SEQ ID NO: 9467 - DNA, 42 bp, Artificial Sequence
  Description of Artificial Sequence:  Hypothetical Probe Sequence
gttcatgccgcccatgcacgtggctgactcgctgcgatgaca

SEQ ID NO: 9468 - DNA, 16 bp, Artificial Sequence
  Description of Artificial Sequence:  Hypothetical Probe Sequence
tgggcggcatgaacca

SEQ ID NO: 9469 - DNA, 23 bp, Artificial Sequence
  Description of Artificial Sequence:  Hypothetical Probe Sequence
gaggcccatcctcaccatcataa

SEQ ID NO: 9470 - DNA, 45 bp, Artificial Sequence
  Description of Artificial Sequence:  Hypothetical Probe Sequence
gaggcccatcctcaccatcatttgcgcaccatcaggttagggaca

SEQ ID NO: 9471 - DNA, 18 bp, Artificial Sequence
  Description of Artificial Sequence:  Hypothetical Probe Sequence
ccggttcatgccgcccaa

SEQ ID NO: 9472 - DNA, 19 bp, Artificial Sequence
  Description of Artificial Sequence:  Hypothetical Probe Sequence
tgatggtgaggatgggccc

SEQ ID NO: 9473 - DNA, 19 bp, Artificial Sequence
  Description of Artificial Sequence:  Hypothetical Probe Sequence
tgatggtgaggatgggcca

SEQ ID NO: 9474 - DNA, 41 bp, Artificial Sequence
  Description of Artificial Sequence:  Hypothetical Probe Sequence
ccggttcatgccgcccagcaccgatatggagaccgcagaca

SEQ ID NO: 9475 - DNA, 19 bp, Artificial Sequence
  Description of Artificial Sequence:  Hypothetical Probe Sequence
gatgatggtgaggatgggg

SEQ ID NO: 9476 - DNA, 17 bp, Artificial Sequence
  Description of Artificial Sequence:  Hypothetical Probe Sequence
ctccggttcatgccgcc

SEQ ID NO: 9477 - DNA, 41 bp, Artificial Sequence
  Description of Artificial Sequence:  Hypothetical Probe Sequence
ctccggttcatgccgcccatcgacaaggtaacgcgtggaca

SEQ ID NO: 9478 - DNA, 22 bp, Artificial Sequence
  Description of Artificial Sequence:  Hypothetical Probe Sequence
agtgtgatgatggtgaggatga

SEQ ID NO: 9479 - DNA, 41 bp, Artificial Sequence
  Description of Artificial Sequence:  Hypothetical Probe Sequence
gcctccggttcatgccggtcccaagttgcggctcactttcg

SEQ ID NO: 9480 - DNA, 23 bp, Artificial Sequence
  Description of Artificial Sequence:  Hypothetical Probe Sequence
ctggagtcttccagtgtgatgac

SEQ ID NO: 9481 - DNA, 18 bp, Artificial Sequence
  Description of Artificial Sequence:  Hypothetical Probe Sequence
ggtgaggatgggcctccg

SEQ ID NO: 9482 - DNA, 42 bp, Artificial Sequence
  Description of Artificial Sequence:  Hypothetical Probe Sequence
ggtgaggatgggcctccgtgagcgcaaggtcagagcacgaca

SEQ ID NO: 9483 - DNA, 31 bp, Artificial Sequence
  Description of Artificial Sequence:  Hypothetical Probe Sequence
catgcaggaactgttacacatgtagttgtaa

SEQ ID NO: 9484 - DNA, 16 bp, Artificial Sequence
  Description of Artificial Sequence:  Hypothetical Probe Sequence
tccggttcatgccgcc

SEQ ID NO: 9485 - DNA, 54 bp, Artificial Sequence
  Description of Artificial Sequence:  Hypothetical Probe Sequence
catgcaggaactgttacacatgtagttgtaccgtaagcccgtatggcagatcaa

SEQ ID NO: 9486 - DNA, 48 bp, Artificial Sequence
  Description of Artificial Sequence:  Hypothetical Probe Sequence
ggagcacgctatcccgttagacggacaggtaggacctgatttccttac

SEQ ID NO: 9487 - DNA, 44 bp, Artificial Sequence
  Description of Artificial Sequence:  Hypothetical Probe Sequence
cgctgccaactaccgcacatccgcttcttgtcctgcttgcttac

SEQ ID NO: 9488 - DNA, 26 bp, Artificial Sequence
  Description of Artificial Sequence:  Hypothetical Probe Sequence
aaaaaatctactgggacggaacagca

SEQ ID NO: 9489 - DNA, 21 bp, Artificial Sequence
  Description of Artificial Sequence:  Hypothetical Probe Sequence
atctactgggacggaacagca

SEQ ID NO: 9490 - DNA, 27 bp, Artificial Sequence
  Description of Artificial Sequence:  Hypothetical Probe Sequence
ttgaggtgcgtgtttgtgcctaaaaaa

SEQ ID NO: 9491 - DNA, 45 bp, Artificial Sequence
  Description of Artificial Sequence:  Hypothetical Probe Sequence
ttgaggtgcgtgtttgtgcctaagccgcagcacgattccgtgaca

SEQ ID NO: 9492 - DNA, 25 bp, Artificial Sequence
  Description of Artificial Sequence:  Hypothetical Probe Sequence
aaaaaaggacggaacagctttgaga

SEQ ID NO: 9493 - DNA, 19 bp, Artificial Sequence
  Description of Artificial Sequence:  Hypothetical Probe Sequence
ggacggaacagctttgaga

SEQ ID NO: 9494 - DNA, 29 bp, Artificial Sequence
  Description of Artificial Sequence:  Hypothetical Probe Sequence
tgcgtgtttgtgcctgtcctggaaaaaaa

SEQ ID NO: 9495 - DNA, 25 bp, Artificial Sequence
  Description of Artificial Sequence:  Hypothetical Probe Sequence
aaaaaaggacggaacagctttgagt

SEQ ID NO: 9496 - DNA, 19 bp, Artificial Sequence
  Description of Artificial Sequence:  Hypothetical Probe Sequence
ggacggaacagctttgagt

SEQ ID NO: 9497 - DNA, 46 bp, Artificial Sequence
  Description of Artificial Sequence:  Hypothetical Probe Sequence
tgcgtgtttgtgcctgtcctggtgagaagcgtccaagccagaacga

SEQ ID NO: 9498 - DNA, 24 bp, Artificial Sequence
  Description of Artificial Sequence:  Hypothetical Probe Sequence
cacctcaaagctgttccgtcccaa

SEQ ID NO: 9499 - DNA, 20 bp, Artificial Sequence
  Description of Artificial Sequence:  Hypothetical Probe Sequence
ccaggacaggcacaaacaca

SEQ ID NO: 9500 - DNA, 46 bp, Artificial Sequence
  Description of Artificial Sequence:  Hypothetical Probe Sequence
cacctcaaagctgttccgtccccatccaaggtccgacacgcaacga

SEQ ID NO: 9501 - DNA, 20 bp, Artificial Sequence
  Description of Artificial Sequence:  Hypothetical Probe Sequence
acggaacagctttgaggtga

SEQ ID NO: 9502 - DNA, 47 bp, Artificial Sequence
  Description of Artificial Sequence:  Hypothetical Probe Sequence
gtgtttgtgcctgtcctgggagacatccaaggtccgacacgcaacga

SEQ ID NO: 9503 - DNA, 20 bp, Artificial Sequence
  Description of Artificial Sequence:  Hypothetical Probe Sequence
cggaacagctttgaggtgca

SEQ ID NO: 9504 - DNA, 27 bp, Artificial Sequence
  Description of Artificial Sequence:  Hypothetical Probe Sequence
tgtttgtgcctgtcctgggagaaaaaa

SEQ ID NO: 9505 - DNA, 45 bp, Artificial Sequence
  Description of Artificial Sequence:  Hypothetical Probe Sequence
tgtttgtgcctgtcctgggagttcgacgattcgcatcaacgcaag

SEQ ID NO: 9506 - DNA, 27 bp, Artificial Sequence
  Description of Artificial Sequence:  Hypothetical Probe Sequence
aaaaaaaagctttgaggtgcgtgttta

SEQ ID NO: 9507 - DNA, 21 bp, Artificial Sequence
  Description of Artificial Sequence:  Hypothetical Probe Sequence
cagctttgaggtgcgtgttta

SEQ ID NO: 9508 - DNA, 27 bp, Artificial Sequence
  Description of Artificial Sequence:  Hypothetical Probe Sequence
tgcctgtcctgggagagaccaaaaaaa

SEQ ID NO: 9509 - DNA, 29 bp, Artificial Sequence
  Description of Artificial Sequence:  Hypothetical Probe Sequence
aaaaaaaacagctttgaggtgcgtgtttt

SEQ ID NO: 9510 - DNA, 21 bp, Artificial Sequence
  Description of Artificial Sequence:  Hypothetical Probe Sequence
cagctttgaggtgcgtgtttt

SEQ ID NO: 9511 - DNA, 44 bp, Artificial Sequence
  Description of Artificial Sequence:  Hypothetical Probe Sequence
tgcctgtcctgggagagaccaacggggaaggttgagcgtgacag

SEQ ID NO: 9512 - DNA, 19 bp, Artificial Sequence
  Description of Artificial Sequence:  Hypothetical Probe Sequence
tttgtgcctgtcctgggaa

SEQ ID NO: 9513 - DNA, 26 bp, Artificial Sequence
  Description of Artificial Sequence:  Hypothetical Probe Sequence
agaccggcgcacagaggaagaaaaaa

SEQ ID NO: 9514 - DNA, 19 bp, Artificial Sequence
  Description of Artificial Sequence:  Hypothetical Probe Sequence
tttgtgcctgtcctgggat

SEQ ID NO: 9515 - DNA, 44 bp, Artificial Sequence
  Description of Artificial Sequence:  Hypothetical Probe Sequence
agaccggcgcacagaggaagcactgcacacgaaacggcacacag

SEQ ID NO: 9516 - DNA, 20 bp, Artificial Sequence
  Description of Artificial Sequence:  Hypothetical Probe Sequence
gtgcctgtcctgggagagaa

SEQ ID NO: 9517 - DNA, 44 bp, Artificial Sequence
  Description of Artificial Sequence:  Hypothetical Probe Sequence
cggcgcacagaggaagagaaaagcaagccaaggtatggctttgc

SEQ ID NO: 9518 - DNA, 20 bp, Artificial Sequence
  Description of Artificial Sequence:  Hypothetical Probe Sequence
gtgcctgtcctgggagagag

SEQ ID NO: 9519 - DNA, 20 bp, Artificial Sequence
  Description of Artificial Sequence:  Hypothetical Probe Sequence
ttgtgcctgtcctgggagaa

SEQ ID NO: 9520 - DNA, 44 bp, Artificial Sequence
  Description of Artificial Sequence:  Hypothetical Probe Sequence
accggcgcacagaggaagagcgtgcgcacactcactgtccttcg

SEQ ID NO: 9521 - DNA, 20 bp, Artificial Sequence
  Description of Artificial Sequence:  Hypothetical Probe Sequence
ttgtgcctgtcctgggagac

SEQ ID NO: 9522 - DNA, 26 bp, Artificial Sequence
  Description of Artificial Sequence:  Hypothetical Probe Sequence
gtctctcccaggacaggcacaaaaaa

SEQ ID NO: 9523 - DNA, 19 bp, Artificial Sequence
  Description of Artificial Sequence:  Hypothetical Probe Sequence
tctcttcctctgtgcgcca

SEQ ID NO: 9524 - DNA, 47 bp, Artificial Sequence
  Description of Artificial Sequence:  Hypothetical Probe Sequence
gtctctcccaggacaggcacaaataccgacatcctgggattgcatgg

SEQ ID NO: 9525 - DNA, 19 bp, Artificial Sequence
  Description of Artificial Sequence:  Hypothetical Probe Sequence
cctgtcctgggagagacca

SEQ ID NO: 9526 - DNA, 47 bp, Artificial Sequence
  Description of Artificial Sequence:  Hypothetical Probe Sequence
gcgcacagaggaagagaatctcctaccgacatcctgggattgcatgg

SEQ ID NO: 9527 - DNA, 17 bp, Artificial Sequence
  Description of Artificial Sequence:  Hypothetical Probe Sequence
agaccggcgcacagaga

SEQ ID NO: 9528 - DNA, 47 bp, Artificial Sequence
  Description of Artificial Sequence:  Hypothetical Probe Sequence
aagagaatctccgcaagaaagggttcggctgttcgtaggcaagaggt

SEQ ID NO: 9529 - DNA, 21 bp, Artificial Sequence
  Description of Artificial Sequence:  Hypothetical Probe Sequence
ttgtcctgcttgcttacctca

SEQ ID NO: 9530 - DNA, 25 bp, Artificial Sequence
  Description of Artificial Sequence:  Hypothetical Probe Sequence
aaaattgtcctgcttgcttacctca

SEQ ID NO: 9531 - DNA, 26 bp, Artificial Sequence
  Description of Artificial Sequence:  Hypothetical Probe Sequence
cttagtgctccctgggggcagaaaaa

SEQ ID NO: 9532 - DNA, 45 bp, Artificial Sequence
  Description of Artificial Sequence:  Hypothetical Probe Sequence
cttagtgctccctgggggcagactccgcattgccagagctgatgg

SEQ ID NO: 9533 - DNA, 19 bp, Artificial Sequence
  Description of Artificial Sequence:  Hypothetical Probe Sequence
ctcaccacgagctgccccc

SEQ ID NO: 9534 - DNA, 18 bp, Artificial Sequence
  Description of Artificial Sequence:  Hypothetical Probe Sequence
tccgcaagaaaggggagc

SEQ ID NO: 9535 - DNA, 43 bp, Artificial Sequence
  Description of Artificial Sequence:  Hypothetical Probe Sequence
ctcaccacgagctgcccccatggccgtgctggggacaagtcaa

SEQ ID NO: 9536 - DNA, 62 bp, Artificial Sequence
  Description of Artificial Sequence:  Hypothetical Probe Sequence
tgcatgcagtcatgcatgcagtcatgcatgcagtcatgcatgcagtcatgcatgcagtcatg

SEQ ID NO: 9537 - DNA, 24 bp, Artificial Sequence
  Description of Artificial Sequence:  Hypothetical Probe Sequence
attcagaatcattttgtggacgaa

SEQ ID NO: 9538 - DNA, 24 bp, Artificial Sequence
  Description of Artificial Sequence:  Hypothetical Probe Sequence
cgcagattttgcgctggatttcaa

SEQ ID NO: 9539 - DNA, 24 bp, Artificial Sequence
  Description of Artificial Sequence:  Hypothetical Probe Sequence
attcagaatcattttgtggacgaa

SEQ ID NO: 9540 - DNA, 24 bp, Artificial Sequence
  Description of Artificial Sequence:  Hypothetical Probe Sequence
atggccgtgctggggacaagtcaa

SEQ ID NO: 9541 - DNA, 21 bp, Artificial Sequence
  Description of Artificial Sequence:  Hypothetical Probe Sequence
tgtggtagttggagctggtga

SEQ ID NO: 9542 - DNA, 24 bp, Artificial Sequence
  Description of Artificial Sequence:  Hypothetical Probe Sequence
ggctcgtgtgtagctgccgttcct

SEQ ID NO: 9543 - DNA, 21 bp, Artificial Sequence
  Description of Artificial Sequence:  Hypothetical Probe Sequence
tgtggtagttggagctggtga

SEQ ID NO: 9544 - DNA, 24 bp, Artificial Sequence
  Description of Artificial Sequence:  Hypothetical Probe Sequence
ggtcaagcgctgaggtggtccatc
